United States Patent Application Publication US 2006/0275315 A1 - sequence listing, part 2

SEQ ID NO: 1373 - DNA, 2160266 bp, Streptococcus pyogenes
aattaacattgttgattttattcttcaacatctgtggaaaactttatttttttatggtacaatataacaataattatccacaagacaataaggaagaagctatgacggaaaacgaacaactattttggaatagagtactagagctatctcgttctcaaatagcaccagcagcttatgaattttttgttctagaggctagactcctcaaaattgaacatcaaactgcagttattactttagataacattgaaatgaaaaagctattctgggaacaaaatttggggcctgttatcctaacagctggttttgaaattttcaatgctgaaattacagctaactatgtctcaaacgatttacatttacaagaaactagtttttctaactaccagcaatctagcaatgaagtaaatactttaccaattagaaaaatcgactctaaccttaaagagaaatatacttttgctaattttgttcaaggagatgaaaatagatgggctgtttcagcatcaattgctgtagctgatagtcctggcacgacttataatcctctatttatctgggggggacctggtctaggaaagacgcatctactaaatgctattggaaatcaagtcttaagagataatccaaacgcgagggttttatacatcactgctgagaattttattaatgaatttgtcagtcatattcgtttagattcgatggaagaattaaaagaaaagtttcgcaacttagacttactcctgattgatgatattcagtcgcttgctaagaaaaccttaggggggacccaagaggagttcttcaatactttcaatgctttacatacaaacgataaacaaatcgtattgaccagtgaccgaaatccaaatcaattaaatgatctagaagaacgtctagtcacgcgctttagttggggactcccagtaaatatcacaccacctgattttgaaacacgagttgctattttaaccaataaaattcaagaatatccttatgattttcctcaagataccattgaatacttagcaggagaatttgattccaacgtacgtgaattagaaggagccttgaaaaatattagtctagttgctgactttaagcatgctaaaactattacagtagatatagctgcagaagctatcagagcacgtaaaaatgatggtcctattgttactgtcattcctatagaagaaattcaaatacaagttggtaaattctatggcgtaactgtaaaagagataaaagcaactaaaagaacacaagatattgtccttgcaagacaggtagccatgtacttagctcgtgagatgacagataacagtctcccaaaaataggtaaagaatttgggggacgagatcactcaactgttctccacgcttataataaaataaaaaatatggttgctcaagatgacaacttacgaattgagatagaaactatcaaaaataaaatcagataggctttgtggataagtatcagaaaaatacgagacttttccacaggttgtgaacaagttattttccttatgaatattaaagttataatacttattcacaactttaacaggacctactattactactaaatttatactaatatataaaggatatactatgattcatttttcaataaataaaaatttcttcttgcatgctctaacggtaaccaaacgagctattagtcataaaaatgcgattccaatcctttcaactgttaaaatagaagtgactagggatgctatcattttaacggggtcaaatggacaaatttcaattgaaaatactattcctgcttcaaatgaaaatgcaggtttactagtaacgaatccaggctctattttgttagaagctggtttctttattaatattatttcaagtttaccagatgtaactttagaatttacagagattgaacaacatcaaattgttcttactagtggaaaatcagagattactttgaaaggtaaggatgtcgatcaataccctcgtctgcaggaaatgacaacagatactccattaacattagaaactaaactgttaaaatcaattattaatgaaactgcttttgctgctagccaacaagaaagccgtccaatcttaacaggtgttcatttggttatcagtcaaaataaatactttaaggctgttgcgacagattcacaccgtatgagtcaacgcactttccaattagagaaatcggctaataattttgatttggttgttccaagtaaatcccttcgagaattttcggctgtttttacagatgatattgaaactgtagaggttttcttctcagatagtcaaatgttatttagaagtgaaaatatcagcttctatacacgtttgcttgaaggaaactaccctgatactgatcgcctcctaactaatcagtttgaaaccgaaattatctttaatacaaatgctttacgccatgctatggaacgtgcttatttaatttcgaatgcaactcagaacggtactgttcgtttagaaattcaaaatgagacagtctcagctcatgtaaactctccagaagttggtaaagttaatgaggaattggatactgttagtcttaaaggtgatagtttaaatattagctttaatccaacttacctaattgaatctttaaaagcagtaaaaagcgaaacagttacgattcgatttatttctccagtacgtccatttactttgacacctggtgaagatactgaagatttcatccaattaataactcctgttcgtactaactaaataagaaaactacccaagttattcttgggtagttttcttattctaagatatgctataatgatgagtaatatgactctatatataatagctaacccccatgctggtaataaaaatgcctccactattgttggtaaaattcaggagctttatcatactgaagatatttctgtgttctatacagaacagaaagatgatgaaaaaaaacaagtcattaatatactaaggtcttttaaagaaagtgatcatctaatgattataggaggagatggtaccttatcaaaagtaatgacttatctcccccaacatattccgtgcacttattatcctgttggttcgggaaatgattttgccagagctttgaaaattcctaacctcaaagaaacccttaccgctattcagacagaaagattaaaggaaattaattgctttatttatgataaagggctgattttgaatagtttagatttaggttttgcagcctatgtcgtttggaaagcatctaactctaaaataaaaaatattttgaatagatatcgtctaggaaaaataacttacattgttatagctatcaaatcattattacattcttctaaagtacaagtattagtggaaggagagacaggacagcagataaaactaaatgacctttattttttcgcattagcaaataacacttattttggaggtggcattactatttggcctaaagcaagtgctttaactgcagagttagatatggtttacgctaaagggcatacttttctaaaacgattaagtattttattatctttggtttttaaaaggcatactacctctaaaagtataaaacaccagactttcaaagctatgaccgtatattttcctaaaaatagtttgattgaaatagatggcgaaatagttgagttagatcagattagtttaaaatgtcaaaaaaggtatttatatatgtaaggagaaaagatgtatcaagttggatcacttgttgaaatgaaaaaacctcatgcttgtgtaattaaagaaactggtaaaaaggctaatcaatggaaggtactgagagtaggagctgatattaaaattcagtgtactaactgtcagcatgtgattatgatgagtcgttatgattttgagcgaaaattaaaaaaagtactgcaaccatgaaagtccttttaaacaaataattatagctatatttgcaaccaatactttcctaaataatgctagtatgccgttggaaaattagctattctaatgttatcgaaagaagaaaggtggtcattgacaatgacgaaagttgcagaacagttatttatttttcggtaagtcatatcaaaatgggaaaatggggataccacaccagatttggataatttaatcaggttagctgagatttttgacgtgagcttagatgaacatgttttagctaaaacaaatgaagttaaagttgaacgtatttatgaaaataaaccccttgatctacgaaaatacaataaaatttattggtttatttttcgaaatattattcgatctctactaattattttagctatattaactttcttataagctctaggtattccctttgtttcggagtggataatttaaatgaaggtgaaagagtggcataatgataagcaaatctgaaattttcttcttatcataccgctttttcttctattttttgatataatagtcttgattgaaatttgaatggagactcactaaatggctttaacagcaggtattgtaggcttaccaaatgttggtaaatcaactttatttaacgcaattacaaaagcaggagcagaagctgctaattatccttttgcgactattgatcccaatgttggtatggtagaagtaccagatgagcgtctacaaaaattgacagaattgattacgcctaaaaaaacagttccgacaacctttgaatttactgatattgcaggtattgttaaaggtgcttcgaagggggaaggtctaggtaataaatttttagctaatattcgtgaagtggatgctattgttcatgtggtacgtgcgtttgatgatgaaaatgttatgcgtgaacaaggtcgtgaggatgctttcgttgatcctatagcagatattgatactattaatcttgaattaatcttagctgatttagagtcaatcaataaacgttatgcgcgtgttgaaaaaatggcacgaactcaaaaagataaagaatcagtagcagagttcaatgttttacaaaagattaaacctgttttggaagatgggaaatcagctcgtaccattgagtttacagaagaggaagcaaaagttgttaaaggtctttttttattaacaactaaacctgttttatatgttgctaatgttgatgaggacaaagtagctgatcctgatgatatcgactatgttaatcaaattcgtgcatttgcagaaacagagaatgcagaagtagtcgtgatttctgctcgagctgaagaagaaatatctgaacttgatgatgaagataagttagaatttttagaagctattggattaacagaatctggtgttgataaattaacacgagctgcttatcatcttttaggccttggaacttactttactgctggtgaaaaagaggttcgcgcttggacgtttaagcgtggtataaaagctccacaagctgctagtattatccattcagattttgaaagaggttttattcgtgcagtaacgatgtcatatgatgaccttattcaatatggatctgaaaaagcagtaaaagaagctggccggttacgtgaagaaggaaaagagtatattgttcaagatggcgatatcatggaattccgtttcaatgtctagtaataaataatcgatttgttaacttttaggttaaggatattgttaatatccttaaccatttttgcgttttaatggagaagataatggtaaaaatgattgttggattaggaaatccaggaagtaaatataatgatacaaaacataatattggatttatggctgttgacagaattgtaaaagaccttgacgtcaactttacagaagataaaaattttaaagcagagataggtagtgattttatcaacggtgaaaaaatttattttatcaaaccgactacttttatgaataacagtggtattgctgtaaaagccctgcttacttactacaacatttctattaaggatatgattatcatatatgatgatttagacatggaagtcggtaaaatacgttttcgtcaaaaaggatctgctgggggacataatggtatcaagtctattattgctcatttaggtactcaagaatttgatcgtattaaagtaggtataggacgtccgaatggacgtatgacagttattaatcatgttctagggaaatttgataaaaatgatgaaattatgatattaaatacccttgataaggttgacaatgctgtcaattattatttacagacgaatgattttcaaaaaacaatgcagaaatacaacggtttaaaatgaatattatagaattatttagccaaaataaagtggtgcggacatggcactctggattagtaactaatagtcgccaattagttatggggttttcaggagcaagtaaagctattgccatagcatcagcctacgagaagttatctaaaaaaattatggtagtcactgccactcaaaccgattctgataaattatcaagtgatatatcaagtttaattggagaagataacgtttatcaattttttgctgatgacgttcctgcagcagagtttattttctcttcattagataaatcaatttcacgactcagtgccctgaggtttctaaaagatccagaaaaaaacggtgttttgattactagtatcagtggtttaaggttactattaccaaatccggaagttttctcgaaaagtcaatataagtttgaaatcggtcaagaatgttatttagataaattgtgtaagaacctagtcaatttaggttatcagaaagtttctcaagtatttagtcctggtgaatttagccaaagaggagatattttagatatttttgagatgacacaagaatatccttatcgcttggaattcttcggagatgaaatagatggcatcaggcagtttgatattgacactcaaaagtctcttaaacaattagagtcagtacagatttcgccagcagatgatattattttacaagatgcagatttcgagcgtgcaaagaaaaaacttgagggctatctagtaacagctagtgaggtacaacgcacctatttgagcgaggttttatctacaactgagaatcattttaagcactcagatattcgtcgttttctaagtatcttttatgaaaaagaatggggaatattagactatattcctgagggaactccactttttgttgatgattttcaaaaaattgtagatcgaaatgctaagttagatttagaaatagctagccttctgacggaagatttacaacaaggcaagtctcattctagtttgaactatttttcagatccttataagcaattaagacaataccaaccagcaaccttcttttcaaatttccacaaaggattaggaaatctgaaatttgataaacttcatcattttactcaatatggaatgcaagaattttttaatcaatttccattgttggtcgatgaaatcaatcgttataagaaatctggagcgacagtactgttgcaagtagattctcaaaaaggtttaaatctccttcaagaaaatttaaaagaatatgggttagatttaatcatttcagataaaaacgatatcgttcaaaaggagtcacaacttattgttgggcatctttcaaatggtttttattttgcagatgagaaaattgttctgattactgaacgtgagatttatcataggcgtgttaaaaggaaaattagacgcagtaatattagtaatgcagaacgtctaaaagattataatgaactttcagttggcgattatgttgttcataatgttcatggcgtaggaaaatttttaggtattgaaacaattgagatacaaggtattcatcgtgattatctgactattcaatatcaaaatgctgatcgtatctctatccccgtagaacaaattgaacttctaacaaaatatgtctctgcagatggcaaagagcctaaaattaatacgttaaatgatggtcgcttcaaaaaagcaaaacagagagttgcaaagcaagtagaagatattgctgatgatttgttgaaactttatgcagagcgtagtcaattacaaggatttgcattttctcctgacgataatatgcaaaatgactttgataatgattttgcatatgtagagacagaggatcaattgcggtctataaaagaaattaaacaggatatggaaggtaatcgtccgatggatcgattattggttggagacgttggttttggtaagacagaggttgctatgcgtgcggctttcaaagctgtcaatgaccataaacaagttgttgttttagtcccaacaacagttctagcccagcagcattttgaaaattttaaagaacgttttagcaattatcctgttacagttgatgtacttagtcgttttcgtagcaaaaaagaacaaacagatacactaaaaagattatctaagggccaagttgatattattattggaacacatcgacttctctctcaagatgttgtattttcggatttagggttaatagttattgatgaggaacagcgatttggtgtaaagcataaagaaaagttaaaagaattaaaaacaaaagttgatgtattaactttgacagcgaccccaatacctagaacattacatatgtcaatgcttggcattagagacttatcagtcattgaaacacctccaactaatcgttatcctgtgcagacttacgttttggagacaaatcctggtttagttagagaagctattattcgtgagatagacagaggaggacaggttttttatgtttacaataaagttgacactattgatcagaaagtttcagaacttcaggagttagtaccagaagctagtattggttttgttcatggtcaaatgtctgaaattcaattagaaaatacattaatagactttatcaatggagattacgatgttttagttgcaacgacaataattgagacaggagtcgatatttcaaatgttaataccctctttgttgaaaatgcagatcatatgggcttgtcaaccctttatcaattaagaggccgtgtgggtagaagtaatcgcattgcttatgcttaccttatgtacagacctgataaagttttaacagaaatttctgagaaaagactagatgcaatcaaagggtttacagaattgggatctggttttaaaatagcgatgcgtgatttatctatacgtggtgcaggaaatattttaggagcttcacaaagtggttttattgattcggttggattcgagatgtattcacagcttctagagcaagcgattgccaccaaacaagggaaatcattaattcgtcaaaaaggtaatgctgaattagccttacaaattgacgcctatttaccagcagaatatatatcagatgagcgccaaaaaatagaaatatataagcgtattcgtgaattagaaactagggctgattatgaagccttacaagatgagttaatagatcgttttggagaatatcctgatcaagttgcataccttttagaaataggacttttaaaagcttatctggaccttgcctttactgaattagtagaaagaaaaggtaatgaaataagcatcctatttgaaaaagcatctttgaagtattttttaactcaagattattttgaagcactatcaaaaactcaacttaaggctagaattagcgaaacaaatggtaagatggaagttgtttttaatatcaaacataagaaaaattatgaaattattgaagaacttctaaaatttgccgaatgttttatcgagattaagtcacgtaaaccagtagaagaataactaagtgaaaagttgcaaggaaatttggatactcttttagaaaatgtttggttcaagaagaatagtacgagcaacattatgtttcacgtcaaacatctcaacttttgaaagacataaatatttttagaggttattaaaatagaagttttttacttgatatttgagagaattaagagagctattagctctctttttgttacattatattgacaaatattatcagttcagatatttttcaaaaaaaatgctaaaatagtagagttaatttagatagaaggatgtgatcatcagtgagattagacaagtatctaaaagtgtcgcgtatcattaagcgtcgtcccgttgctaaagaagttgcagacaaaggacgtgtcaaggtgaatggcgtattagcaaagtcatcaactgacctaaagcttaatgaccaagttgaaattcgttttggtaataaattgttgaccgttaaagtattagaaatgaaagatagcactaagaaagaagatgctatcaaaatgtatgaaattattaatgaaacaaggatagaaacagatgagcaagcctaatgttgttcagttaaataatcaatatattaacgatgagaatctaaaaaaacgttacgaagctgaggagttacgccgaaaaaatcgtttaatgggttgggttcttatttttgtcatgcttttatttattttacccacttataatttagttaagagttacagaactttacaagaacgtcgtcaagaagttgtaaaattaacgaaagactatcagacattaactaatagaactgagaaccagaagttgctagcaaaacaactaaaaaatccagattacgttcaaaaatatgctcgagctaagtattatttctctaagaccggcgaaatgatttacccattaccagaccttttaccaaaataattatgaataatttaattgaaacaatagaacattttctagcctactcggatgacaaactagaagaattagctgataagaactatcaacttaggcaaacaattgtagaaaaagaaaagattgagagcagagaaaagtaatgaagaaagttttaaccttcttattatgtagcttatattttgtatcaatcccagctataagtaccgaggagccattaacgctttctcaaaatagacgatacgccttaactcagacagttgtggataaggaaatgtattttgatgctattccagagagaccaactacaaaaattgaaataagcagttttcaagatgaagctttaaccataacaggagagactttagttccaaatactttattgtcgattgtttctcttacaattaattcaaatggaattccagtatttactttgtccaatggacagttcataaaggctagtcgtgaagctatttttaatgatttagtttctaagcagcaatctgtctcattggattattggttaaaaccttcttttgtgacttatgaagcaccttacacaaatggtgttagtgaagttaaaaataatttaaaaccttattccagagtgcatttagtagaacaagcagaaacagaacatggtatttattataaaacggacagtggtttttggatatcagtagaagatctatcggttgctgataatcgtatggctaaggttcaagaagtattattggaaaaatataataaagataaatatggtatatacatcaaacaattaaatacacagacagtagctggtattaatattgataggtcaatgtactctgcaagtattgcaaaattagcaacactttatgctagccaagagcaagtaaaattaggaaaactgtcattggacagcaaatttgaatacaaagataatgttaatcaatttcctaatagctatgatccaagtggtagtgggaaattagagaaaaaagctgatcataaattatataccgttaaggagttacttgaagcaactgccaaggaatcagataatgttgcaacaaatatgctaggttattatgtcaataatcaatatgattcaatgtttcaaacacaagtagacacaatttctggtatgcactgggatatgaaaaaacgccagatttctccacaagctgcgggtaaaatgatggaagcaatttattatcaaaatggagatattgttaattacctatcaaagactgattttgataatacaagaatccctaaaaatataccagttaaagtagcacataaaattggagatgcttatgactacaaacatgatgcggctattgtttatgcagaacaaccttttattatgattatctttacggataaatcatcttacgatgatatcactaagattgctgacgacgtttaccaggttttaaaataatatgtataacactattttgaaagataccttatccaaagggttatttaccgctcatcagaaagttctaattgctgtttctggtggcattgattcaataaatttgttgcaatttttataccagtatcaaaaagagttatcgattagtattggtattgcacacataaatcatggacagcgaaaagaatcagaaaaagaagaagaatatatcagacagtggggacagatacatgatgtccctgtctttatctcttattttcaaggaatattttcagaagatagagcacgtaaccatcgctacaattttttttcaaaagttatgcgtgaagaaggttacacggctttagtaacagctcaccatgctgatgatcaagctgaaactgtatttatgagaattttaagaggaagcaggctacgctatttatcagggattaagcaagtgagtgcttttgcaaacggtcaattgattagaccatttcttccatataaaaaggagttattaccaaatatttttcattttgaagatgctagcaacgcttcgtctgattatttaagaaatcgaataagaaacgtctactttcctgctttggaaagagaaaataatcaattgaaagattctctcataactctctctgaggaaacagagtgtttattcacggctttaacagacctaacaaggagcatcgaagtaacaaactgctatgattttttaaggcaaactcattctgtccaagaatttttattgcaagattacattagcaaatttccagatttacaagtgagtaaagaacagttcagagtaatattaaaattgattagaactaaagccaatattgactatactattaaatcgggctattttcttcataaggattacgagagttttcatattacaaaaatccatcctaagacggatagttttaaggttgaaaaaagattagaattgcataatatacaaatattctcacaatatttattttcctatggaaaattcatttctcaagcagacattactattcctatttatgatacttctccgattattttaagaagaagaaaagaaggggataggatatttttaggaaatcacactaaaaaaattcgccgtctatttattgatgagaaaataactctaaaagagagagaagaagctgttattggggagcaaaataaagagttgatatttgtgattgttgcaggtagaacatatttgagaaaaccttctgaacatgatataatgaagggcaaactttatattgaaaatttagaaaaaaggtgacatcatgcttgaaaatgatataaaaaaagttttatattcagaagaagatattattctgaaaacgaaagaattaggagctaaattaactgcagattatgcaggtaagaatccattattagtaggtgtattaaaggggtcagtgccttttatggctgagctattaaagcatattgatacacatgttgaaattgattttatggttgtttcaagctatcatggtggtacaactagtagtggagaagttaaaattttaaaagatgttgatactaacattgaaggaagagatgtaatctttattgaagacatcattgatactggacgtacattaaaataccttcgagatatgtttaagtatcgccaagctaactctgtcaaagttgcaaccctttttgataagccagaagggcgattggtagatattgatgctgattacgtttgttacgatatcccaaatgaatttattgtgggattcggtttagactatgctgaaaactatcgtaacttaccttatgttggtgtgttaaaagaagaaatttactcaaaatagaaaaaaggtactctcttaaactatgaaaaataataaaaataatggttttctgaaaaattcctttatttacatattattgattattgcggttattacaacctttcaatactatttaaaaggaactagctctcaaaaccagcaaatttcttatacaaaacttgttaaacaattaaaagctggagaaattaagtctatctcataccagccaagtggtggtgttgttgaagttagtgggacatataagaaagccaaaacaattaaatcagctaatagttttacttttttaggtggtagtgttgctactaaagttacaggatttaattctgttatactaccaaatgactcttcaataaaatctcttgttagcgctgctgaagaaaataacactaatattcaggtcaaacatgaaagttcaagtgggacatggatttcttatattgccagttttttacctttagttatcatgattggtttcttcatgatgatgatgaaccaaggcggtggcggtggcgctcgtggtgccatgagctttggtaaaaataaagcaagatcatctagtaaagatgaggttaaagttcgattttcggatgttgctggagcagaggaagaaaagcaagaattaatagaagtcgttgacttccttaaagatcctaaacgatataaatctctaggtgcccgaattccagcaggggttctattagaaggacctccagggacaggtaaaaccctattagcaaaagctgttgccggtgaagcaggggttccattctttagtatttccggttcagattttgttgaaatgtttgtcggtgttggagctagtcgagtacgctctttgtttgaagatgctaaaaaagctgaacgtgctattattttcattgatgaaattgatgctgttggacgtcgacgtggagctggtatgggtggcggaaacgatgaacgtgaacaaacgctcaaccaacttttaattgaaatggatggttttgaaggaaacgaaagtattatcgttatcgctgctaccaaccgtagtgatgtgttagatcccgcattactgcgtccaggacgttttgatagaaaagttctagttggacaacctgatgtaaaaggtcgtgaagcaattctgagagtacatgctaaaaataaaccattagcagataatgttgacttaaaagtagtagctcaacaaaccccaggatttgttggtgctgatttggagaatgttctcaatgaagctgctttagttgctgcgcgacgaaataaaaaagttattgatgcttcagatattgatgaagcagaagaccgtgtaattgctggtccttctaaaaaagatcgtactatttctgaaagagaaagagctatggttgcttaccatgaagctgggcacacaattgtcggtttgattctttcaaatgcgcgagttgttcataaagttactatcgtaccacgtggtcgtgcaggtggatatatgattgctttacctaaagaagatcaaatgcttctttcaaaagatgatatgaaagagcaattagcaggtcttatgggaggacgtgtagcggaagaaattattttcaacgctcagacaacaggtgcctcaaatgacttcgaacaagccactgctatggcccgcgctatggtaactgaatatggtatgagcgagaaacttggaccagttcaatacgaaggcaaccacgcaatgatggctggtcaaatgtcacctgaaaaatcatattctgctcaaactgcacaacttattgatgatgaagttcgtcaccttcttaatgaagcacgtaataaggcagctgatattatcaacgaaaaccgtgatactcataaattaattgcagaagccctcttaaaatatgagactcttgatgctgctcagattaaatcgatttttgagacaggtaaaatgcctgagacagaaaatgatgaagataaagcaagagcgttatcatacgatgaaatcaaagaaaaaatgcaagaagaagataaaaaataagtcatcatatatttttaaagaactttataaatttcaaatacccttcaaatttagataaaatttgaagggtattttttatgaagatgaagtttaaatttgtgaattaagaagatgaaatatgaacatgacaacggtaaaaatgctatccattcaacaagtatagaaggttagttactataaataatattaactttttaaaaataaaagaaaaaatgcaaaaatagtattgacaggaagtagaaatatttagtataatgaataagttgtctcgagagagcagcttctagtaacgcgtagttaacaacttaaaaaaaagtagttgacaaagcagaataagtttgctagaatatagaagttgtctcaagagaggcaaagacctttgaaaactgaacaagacgaacgaatgtgcagggtggatttacattgtaaatccgtcaatgacaaaaaaacaataaatctgtcagcgagacagaaaagagcaaagctcaaacttttaatgagagtttgatcctggctcaggacgaacgctggcggcgtgcctaatacatgcaagtagaacgctgaggtttggtgtttacactagactgatgagttgcgaacgggtgagtaacgcgtaggtaacctgcctcatagcgggggataactattggaaacgatagctaataccgcataagagtaattaacacatgttagttatttaaaaggagcaattgcttcactgtgagatggacctgcgttgtattagctagttggtgaggtaaaggctcaccaaggcgacgatacatagccgacctgagagggtgatcggccacactgggactgagacacggcccagactcctacgggaggcagcagtagggaatcttcggcaatggacggaagtctgaccgagcaacgccgcgtgagtgaagaaggttttcggatcgtaaagctctgttgttagagaagaacgttggtaggagtggaaaatctaccaagtgacggtaactaaccagaaagggacggctaactacgtgccagcagccgcggtaatacgtaggtcccgagcgttgtccggatttattgggcgtaaagcgagcgcaggcggttctttaagtctgaagttaaaggcagtggcttaaccattgtacgctttggaaactggaggacttgagtgcagaaggggagagtggaattccatgtgtagcggtgaaatgcgtagatatatggaggaacaccggtggcgaaagcggctctctggtctgtaactgacgctgaggctcgaaagcgtggggagcaaacaggattagataccctggtagtccacgccgtaaacgatgagtgctaggtgttaggccctttccggggcttagtgccgcagctaacgcattaagcactccgcctggggagtacgaccgcaaggttgaaactcaaaggaattgacgggggcccgcacaagcggtggagcatgtggtttaattcgaagcaacgcgaagaaccttaccaggtcttgacatccttctgaccggcctagagataggctttctcttcggagcagaagtgacaggtggtgcatggttgtcgtcagctcgtgtcgtgagatgttgggttaagtcccgcaacgagcgcaacccctattgttagttgccatcattaagttgggcactctagcgagactgccggtaataaaccggaggaaggtggggatgacgtcaaatcatcatgccccttatgacctgggctacacacgtgctacaatggttggtacaacgagtcgcaagccggtgacggcaagctaatctcttaaagccaatctcagttcggattgtaggctgcaactcgcctacatgaagtcggaatcgctagtaatcgcggatcagcacgccgcggtgaatacgttcccgggccttgtacacaccgcccgtcacaccacgagagtttgtaacacccgaagtcggtgaggtaaccttttaggagccagccgcctaaggtgggatagatgattggggtgaagtcgtaacaaggtagccgtatcggaaggtgcggctggatcacctcctttctaaggataaggaaacctgccatttgcgtcttgtttagttttgagaggtcttgtggggccttagctcagctgggagagcgcctgctttgcacgcaggaggtcagcggttcgatcccgctaggctccattgaatcgaaaggttcaaattgttcattgaaaattgaatatctatatcaaattccacgatctagaaatagattgtagaaagtaacaagaaaataaaccgaaaacgctgtgaatatttaatgagttttctagttttaaagaaactaggttaataaggttaagttaataagggcgcacggtggatgccttggcactagaagccgaagaaggacgtgactaacgacgaaatgctttggggagctgtaagtaagcgctgatccagagatgtccgaatgggggaacccactagttaatgactagtatccatatctgttaaggatatgagaaggaagacgcagtgaactgaaacatctaagtagctgcaggaagagaaagcaaaagcgattgccttagtagcggcgagcgaaacggcaggagggcaaaccgaagtgtttacacttcggggttgtaggactgcgatataggattaatcattatagaagaattacctgggaaggtaagccaaagagagtaacagcctcgtatttaaaatgatagattaaccttagcagtatcctgagtacggcgagacacgcgaaatctcgtcggaatctgggaggaccatctcccaaccctaaatactctctagtgaccgatagtgaaccagtaccgtgagggaaaggtgaaaagcaccccgggaggggagtgaaatagaacctgaaaccgtgtgcctacaacaagttcgagcccgttaatgggtgagagcgtgccttttgtagaatgaaccggcgagttacgatatgatgcgaggttaagttgaagagacggagccgtagggaaaccgagtcttaatagggcgtcatagtatcatgttgtagacccgaaaccatgtgacctacccatgagcaggttgaaggtgaggtaaaactcactggaggaccgaaccagggcacgttgaaaagtgcttggatgacttgtgggtagcggagaaattccaaacgaacttggagatagctggttctctccgaaatagctttagggctagcgtcgatgttaagtctcttggaggtagagcactgtttgggtgaggggtccatcccggattaccaatctcagataaactccgaatgccaacgagatataatcggcagtcagactgcgagtgctaagatccgtagtcgaaagggaaacagcccagaccaccagctaaggtcccaaaatatatgttaagtggaaaaggatgtggggttgcacagacaactaggatgttagcttagaagcagctattcattcaaagagtgcgtaatagctcactagtcgagtgaccctgcgccgaaaatgtaccggggctaaaacatattaccgaagctgtggatgacacaaaagtgtcatggtaggagagcgttctatgtgtgaagaaggtgtaccgtgaggagcgctggaacgcatagaagtgagaatgccggtatgagtagcgcaagacaggtgagaatcctgtccaccgtaagactaaggtttccaggggaaggctcgtccgccctgggttagtcgggacctaaggagagaccgaaaggtgtatccgatggacaacaggttgatattcctgtactagagtatatagtgatggagggacgcagtaggctaactaaaccagacgattggaagtgtctggtcaaacagtgaggtgtgatatgagtcaaatgcttatatctttaacattgagctgtgacgaggagcgaagtttagtagcgaagttagtgatgtcacactgccaagaaaagcttctagcgatacatatactctacccgtaccgcaaaccgacacaggtagtcgaggcgagtagcctcaggtgagcgagagaactctcgttaaggaactcggcaaaatggccccgtaacttcgggagaaggggcgctgattttagatcagccgcagtgaataggcccaagcaactgtttatcaaaaacacagctctctgctaaatcgtaagatgatgtatagggggtgacgcctgcccggtgctggaaggttaagaggagtgcttagcgtaagcgaaggtatgaattgaagccccagtaaacggcggccgtaactataacggtcctaaggtagcgaaattccttgtcgggtaagttccgacccgcacgaaaggcgtaatgatttgggcactgtctcaacgagagactcggtgaaattttagtacctgtgaagatgcaggttacccgcgacaggacggaaagaccccatggagctttactgcagtttgatattgagtatctgtaccacatgtacaggataggtaggagcctatgataacgggacgccagtttcgtttgaggcgttgttgggatactacccttgtgttatggctactctaacccagataggcaatccctatcggagacagtgtctgacgggcagtttgactggggcggtcgcctcctaaaaggtaacggaggcgcccaaaggttccctcagactggttggaaatcagtcgtagagtgtaaaggtataagggagcttgactgcgagagctacaactcgagcagggacgaaagtcgggcttagtgatccggtggttccgtatggaagggccatcgctcaacggataaaagctaccctggggataacaggcttatctcccccaagagttcacatcgacggggaggtttggcacctcgatgtcggctcgtcgcatcctggggctgtagtcggtcccaagggttgggctgttcgcccattaaagcggcacgcgagctgggttcagaacgtcgtgagacagttcggtccctatccgtcgcgggcgtaggaaatttgagaggatctgctcctagtacgagaggaccagagtggacttaccgctggtgtaccagttgtcttgccaaaggcatcgctgggtagctatgtagggaagggataagcgctgaaagcatctaagtgcgaagcccacctcaagatgagatttcccatgattttatatcagtaagagccctgagagatgatcaggtagataggttaggagtgtaattgtggtgacacatttagcggactaatactaatagctcgaggacttatccaaaaagagatattgacaacgttacggtttcttgttagactatagatattcaattttgagtgaataaggctcaatagttaagtgataattgcctaggagatacacctgttctcatgccgaacacagaagttaagccctagaacgccggaagtagttgggggttgccccctgtgagataaggtagtcgcttagcaaagggagtttagctcagctgggagagcatctgccttacaagcagagggtcagcggttcgatcccgttaactcccataggtcccgtagtgtagcggttatcacgtcgccctgtcacggcgaagatcgcgggttcgattcccgtcgggaccgtagactcgttagctcagttggtagagcaattgacttttaatcaatgggtcactggttcgagcccagtacgggtcatttagaaatgcgggtgtggcggaattggcagacgcaccagatttaggatctggcgcttaacggcgtgggggttcaagtcccttcacccgcattagtagattgccggcttagctcagttggtagagcatctgatttgtaatcagagggtcgcgtgttcaagtcatgtagccggcattacaattttataggataaatagtgtctttagtgcgaacgtagttcagtggtagaacatcaccttgccaaggtgagggtcgcgggttcgaaccccgtcgttcgcttgttagaggccggggtggcggaactggcagacgcacaggacttaaaatcctgcgatggtaaacatcgtaccggttcgattccggtcctcggcatataatatttagcacccttagctcaactggatagagtacctgactacgaatcaggcggttagaggttcgactcctctagggtgcatatttttcgggaagtagctcagcttggtagagtacttggtttgggaccaaggtgtcgcaggttcgaatcctgtcttcccgatggatatatttttatgatatatcattagacctttgaaaactgaacaagacgaacgaatgtgcagggtggatttacattgtaaatccgtcaatgacaaaaaacaataaatctgtcagcgagacagaaaagagcaaagctcaaacttttaatgagagtttgatcctggctcaggacgaacgctggcggcgtgcctaatacatgcaagtagaacgctgaggtttggtgtttacactagactgatgagttgcgaacgggtgagtaacgcgtaggtaacctgcctcatagcgggggataactattggaaacgatagctaataccgcataagagtaattaacacatgttagttatttaaaaggagcaattgcttcactgtgagatggacctgcgttgtattagctagttggtgaggtaaaggctcaccaaggcgacgatacatagccgacctgagagggtgatcggccacactgggactgagacacggcccagactcctacgggaggcagcagtagggaatcttcggcaatggacggaagtctgaccgagcaacgccgcgtgagtgaagaaggttttcggatcgtaaagctctgttgttagagaagaacgttggtaggagtggaaaatctaccaagtgacggtaactaaccagaaagggacggctaactacgtgccagcagccgcggtaatacgtaggtcccgagcgttgtccggatttattgggcgtaaagcgagcgcaggcggttctttaagtctgaagttaaaggcagtggcttaaccattgtacgctttggaaactggaggacttgagtgcagaaggggagagtggaattccatgtgtagcggtgaaatgcgtagatatatggaggaacaccggtggcgaaagcggctctctggtctgtaactgacgctgaggctcgaaagcgtggggagcaaacaggattagataccctggtagtccacgccgtaaacgatgagtgctaggtgttaggccctttccggggcttagtgccgcagctaacgcattaagcactccgcctggggagtacgaccgcaaggttgaaactcaaaggaattgacgggggcccgcacaagcggtggagcatgtggtttaattcgaagcaacgcgaagaaccttaccaggtcttgacatccttctgaccggcctagagataggctttctcttcggagcagaagtgacaggtggtgcatggttgtcgtcagctcgtgtcgtgagatgttgggttaagtcccgcaacgagcgcaacccctattgttagttgccatcattaagttgggcactctagcgagactgccggtaataaaccggaggaaggtggggatgacgtcaaatcatcatgccccttatgacctgggctacacacgtgctacaatggttggtacaacgagtcgcaagccggtgacggcaagctaatctcttaaagccaatctcagttcggattgtaggctgcaactcgcctacatgaagtcggaatcgctagtaatcgcggatcagcacgccgcggtgaatacgttcccgggccttgtacacaccgcccgtcacaccacgagagtttgtaacacccgaagtcggtgaggtaaccttttaggagccagccgcctaaggtgggatagatgattggggtgaagtcgtaacaaggtagccgtatcggaaggtgcggctggatcacctcctttctaaggataaggaaacctgccatttgcgtcttgtttagttttgagaggtcttgtggggccttagctcagctgggagagcgcctgctttgcacgcaggaggtcagcggttcgatcccgctaggctccattgaatcgaaaggttcaaattgttcattgaaaattgaatatctatatcaaattccacgatctagaaatagattgtagaaagtaacaagaaaataaaccgaaaacgctgtgaatatttaatgagttttctagttttaaagaaactaggttaataaggttaagttaataagggcgcacggtggatgccttggcactagaagccgaagaaggacgtgactaacgacgaaatgctttggggagctgtaagtaagcgctgatccagagatgtccgaatgggggaacccactagttaatgactagtatccatatctgttaaggatatgagaaggaagacgcagtgaactgaaacatctaagtagctgcaggaagagaaagcaaaagcgattgccttagtagcggcgagcgaaacggcaggagggcaaaccgaagtgtttacacttcggggttgtaggactgcgatataggattaatcattatagaagaattacctgggaaggtaagccaaagagagtaacagcctcgtatttaaaatgatagattaaccttagcagtatcctgagtacggcgagacacgcgaaatctcgtcggaatctgggaggaccatctcccaaccctaaatactctctagtgaccgatagtgaaccagtaccgtgagggaaaggtgaaaagcaccccgggaggggagtgaaatagaacctgaaaccgtgtgcctacaacaagttcgagcccgttaatgggtgagagcgtgccttttgtagaatgaaccggcgagttacgatatgatgcgaggttaagttgaagagacggagccgtagggaaaccgagtcttaatagggcgtcatagtatcatgttgtagacccgaaaccatgtgacctacccatgagcaggttgaaggtgaggtaaaactcactggaggaccgaaccagggcacgttgaaaagtgcttggatgacttgtgggtagcggagaaattccaaacgaacttggagatagctggttctctccgaaatagctttagggctagcgtcgatgttaagtctcttggaggtagagcactgtttgggtgaggggtccatcccggattaccaatctcagataaactccgaatgccaacgagatataatcggcagtcagactgcgagtgctaagatccgtagtcgaaagggaaacagcccagaccaccagctaaggtcccaaaatatatgttaagtggaaaaggatgtggggttgcacagacaactaggatgttagcttagaagcagctattcattcaaagagtgcgtaatagctcactagtcgagtgaccctgcgccgaaaatgtaccggggctaaaacatattaccgaagctgtggatgacacaaaagtgtcatggtaggagagcgttctatgtgtgaagaaggtgtaccgtgaggagcgctggaacgcatagaagtgagaatgccggtatgagtagcgcaagacaggtgagaatcctgtccaccgtaagactaaggtttccaggggaaggctcgtccgccctgggttagtcgggacctaaggagagaccgaaaggtgtatccgatggacaacaggttgatattcctgtactagagtatatagtgatggagggacgcagtaggctaactaaaccagacgattggaagtgtctggtcaaacagtgaggtgtgatatgagtcaaatgcttatatctttaacattgagctgtgacgaggagcgaagtttagtagcgaagttagtgatgtcacactgccaagaaaagcttctagcgatacatatactctacccgtaccgcaaaccgacacaggtagtcgaggcgagtagcctcaggtgagcgagagaactctcgttaaggaactcggcaaaatggccccgtaacttcgggagaaggggcgctgattttagatcagccgcagtgaataggcccaagcaactgtttatcaaaaacacagctctctgctaaatcgtaagatgatgtatagggggtgacgcctgcccggtgctggaaggttaagaggagtgcttagcgtaagcgaaggtatgaattgaagccccagtaaacggcggccgtaactataacggtcctaaggtagcgaaattccttgtcgggtaagttccgacccgcacgaaaggcgtaatgatttgggcactgtctcaacgagagactcggtgaaattttagtacctgtgaagatgcaggttacccgcgacaggacggaaagaccccatggagctttactgcagtttgatattgagtatctgtaccacatgtacaggataggtaggagcctatgataacgggacgccagtttcgtttgaggcgttgttgggatactacccttgtgttatggctactctaacccagataggcaatccctatcggagacagtgtctgacgggcagtttgactggggcggtcgcctcctaaaaggtaacggaggcgcccaaaggttccctcagactggttggaaatcagtcgtagagtgtaaaggtataagggagcttgactgcgagagctacaactcgagcagggacgaaagtcgggcttagtgatccggtggttccgtatggaagggccatcgctcaacggataaaagctaccctggggataacaggcttatctcccccaagagttcacatcgacggggaggtttggcacctcgatgtcggctcgtcgcatcctggggctgtagtcggtcccaagggttgggctgttcgcccattaaagcggcacgcgagctgggttcagaacgtcgtgagacagttcggtccctatccgtcgcgggcgtaggaaatttgagaggatctgctcctagtacgagaggaccagagtggacttaccgctggtgtaccagttgtcttgccaaaggcatcgctgggtagctatgtagggaagggataagcgctgaaagcatctaagtgcgaagcccacctcaagatgagatttcccatgattttatatcagtaagagccctgagagatgatcaggtagataggttaggagtgtaattgtggtgacacatttagcggactaatactaatagctcgaggacttatccaaaaagagatattgacaacgttacggtttcttgttagactatagatattcaattttgagtgaataaggctcaatagttaagtgataattgcctaggagatacacctgttctcatgccgaacacagaagttaagccctagaacgccggaagtagttgggggttgccccctgtgagataaggtagtcgcttagcaaagggagtttagctcagctgggagagcatctgccttacaagcagagggtcagcggttcgatcccgttaactcccataggtcccgtagtgtagcggttatcacgtcgccctgtcacggcgaagatcgcgggttcgattcccgtcgggaccgtagactcgttagctcagttggtagagcaattgacttttaatcaatgggtcactggttcgagcccagtacgggtcatttagaaatgcgggtgtggcggaattggcagacgcaccagatttaggatctggcgcttaacggcgtgggggttcaagtcccttcacccgcattagtagattgccggcttagctcagttggtagagcatctgatttgtaatcagagggtcgcgtgttcaagtcatgtagccggcattacaattttataggataaatagtgtctttagtgcgaacgtagttcagtggtagaacatcaccttgccaaggtgagggtcgcgggttcgaaccccgtcgttcgcttgttagaggccggggtggcggaactggcagacgcacaggacttaaaatcctgcgatggtaaacatcgtaccggttcgattccggtcctcggcatataatatttagcacccttagctcaactggatagagtacctgactacgaatcaggcggttagaggttcgactcctctagggtgcatatttttcgggaagtagctcagcttggtagagtacttggtttgggaccaaggtgtcgcaggttcgaatcctgtcttcccgatggatatatttttatggcggtgtagctcagctggctagagcgtccggttcatacccgggaggtcgggggttcgatcccctccgccgctatttattttattgagactttggacctttagctcaactggttagagcactcggctcataaccgagcggtcgtaggttcgagtcctacaaggtccatattttttgttatatggaggattacccaagtccggctgaagggaacggtcttgaaaaccgtcaggcgtgtaaaagcgtgcgtgggttcgaatcccacatcctcctttaaagatatcgcgggatggagcagctaggtagctcgtcgggctcataacccgaaggtcgtaggttcaaatcctgctcccgcaataggctcggtagctcagttggtagagcaatggattgaagctccatgtgtcggcggttcgattccgtctcgcgccatttattatataagtttttagcgggtgtagtttagtggtaaaactacagccttccaagctgttgtcgcgagttcgattctcgtcacccgcttactttacataaaagtaaaaccaagcatttgcttgggcgcgtagctcaggtggttagagcgcacgcctgataagcgtgaggtcggtggttcgagtccactcgtgcccattaatattaatttggagaattactcaagaggctgaagaggacggtttgctaaatcgttaggtcgggtaactggcgcaagggttcgaatcccttattctccgtaaatattataattttaagagtaattatactctttttttatttctcttttagtttcactatggagtaattatattgatagagtgaatagaagaaggttatcgttttctagatttgattatggttcatttagaaatagttgatttcaaatataaatgtaacaatgacgtaatataatttcgtgaattttttggtaaaatatttaatgtcttatcgtaaaggagtagtttaataaaaatgaaaaaaagaatattatcagcagtccttgtgagtggagtaactcttggaactgctgccgtaacagtaaacgctgatgactttgactcgaaaattgctgctactgattcagtaatcaatactttatcagggcaacaagcagcagcacaaaaccaggtgactgctattaaaggacaagttggtgctttagagtctcaacaatcagaattagaagcgcaaaatgctcaacttgaggctgtatctcagcagttaggtcaagagattcaaactctttctaataaaattgttgcacgtaacgaatctttgaaaaagcaagttcgtagtgctcaaaagggtaacttgactaactatattaatactattttaaattcgaaatcagtatctgatgctgttaatcgtgttgttgctattcgtgaggttgtttcagctaatgaaaagatgttagcacaacaagaggctgacaaagcggccttagaagctaaacaaattgaaaatcaaaatgctataaatactgtagcagctaacaagcaagctatcgaaaataataaagcagccttagcaacacaaagagcacaattagaagcagctcaattagagttatctgctcaattgactacagtccaaaatgaaaaagcatctttaattcaggcaaaagcacaagctgaggaagctgcgcgtaaggcagctgaagcacaagcagcagctgaagcgaaagcacaagctgaagcgaaagcacaagctgagtctgtagcaaaagcacaggcagcagcacaagttgagtctgccacagctcctactgaaacagttcaaacacaaccgagaactgaaataaagccttctaatcttacggctacttcttcggcaactactgttgctacaactacagctacagctactaatgagccaaaagttactcaaccttctgtagtaactaaagcagttgaagcacctaaagcagttgtttcttcaacacctagagcggtatcaaaacctgttgtcagaagttatgattcaagtaacacatacccaatgggacaatgtacttggggagctaagtcaatggcttcttgggttggtaactattggggaaatgctaatcagtggggtgctagtgcacgtgcagctggttattctgtaggaactacccctcgtgttggtgcagtagctgtttggccatatgatggtggtggttacgggcacgttgcagtagtaacgtcagtggctaacaattcatctatccaagttatggaatcaaactatgctggaaatatgagtattggcaattaccgtggttcatttaaccctagtgcttctggctctgtttactatatttacccaaattaatgaatactaaggagatctttcgtggtctcctttttgtttattaattaggtatggtttattttggattgaaaaattgtgtaaaaagcgttaaaatggtataggactaaagttttggaggaaatcatgtcttattctaatttaaaattgtttgcactgtcatcaaacaaagaactagcgaaaaaagtgtctcagacgattggaattccgctaggtcaatcgacagttcgccaattttctgatggtgagattcaagttaatattgaagagtctattcgtggccatcatgtttttattttacaatcaacaagctcaccagttaatgataatttgatggaaattttaattatggttgacgctttaaagcgtgctagtgcggagtctgttagtgtggtaatgccttactatgggtatgctcgtcaagatcgcaaggcacgttctcgtgaacctattacttcgaaactcgttgcgaacatgctagaagttgctggtgttgatcgtcttttaacagttgatttacatgcagctcaaattcagggattctttgatattcccgttgatcaccttatgggggctccccttattgcagattactttgatcgtcagggattggttggtgatgatgttgttgtcgttagtcctgatcatggtggcgtaacacgtgcacgtaagctggcacagtgtttaaagacaccgattgctatcattgataagcgccgtagtgttactaaaatgaatacatctgaagtaatgaatattattggtaatatcaaaggtaaaaaatgtattttaattgatgatatgattgatactgcaggtactatttgccatgctgcagacgctttagctgaagcaggggcaacagcggtttatgcttcatgtactcaccctgttttatcagggccggctttggataatattcaaaattcagctattgaaaaattaattgtgttagatacgatttacctccctgaagaacgtttgattgataagattgaacaaatttcaattgcggaattgattggtgaagctattatccgtattcacgagaaacgtcctttatcaccattatttgaaatgaataaactaaaatgacaaaaaacctgttattaacaggttttttatcatttaatgacggaaaactggacacaaattatttttcttgtataattaaatatattatttcttatcaggaggttatgatgacattagagaaacgatttaataagtacttagatagaatagaggtctccttaattcgtcagtttgatcaatctatttcagatatacctggaatggtaaaattaactcttggagaaccagattttaccactcctgatcatgttaaagaagcagctaaatcagctattgatgcgaatcaatcgtattacactggtatgagcggtttattagctctaaggcaagctgctgcagattttgcaaaggataaatataatcttacttataatcctgattgtgagatcttggttacgataggtgccacagaagctctgtctgcatctcttatagctattttagaagctggtgatgttgttctattacctgcccccgcttatccaggatatgagccaatagttaaccttgtaggagctgatatcgtagaaattgatactagagaaaatgactttagactaactcctgaaatgttagaaacggctattatccaacaaggtgaaaaattaaaggctgttttacttaattatcctactaaccctacaggtattacctattcaaggcaagaaattgctgcattagctgaagtccttaaaaaatatgatatttttgttattagtgatgaagtttattctgagttaacttacactggtcagcagcatgtttcaattgcagaatatttacctaaccaaactatcttaattaatggcttatcaaaatcacatgctatgactggttggagagttggattggtgtatgctcctgaagcatttattgctcaaatcattaaaagtcatcaatacatggtgacagctgctagtactatttcgcaatttgctggggtagaagccttatctgtgggtaaaaatgatacgttacctatgcgtcaaggatatattaaacgtagagattatatcattgataaaatgtctaaacttggtttcaaaataattaaaccgagtggcgctttttatatctttgctaaaatacctgatagctatccacaggattctttcaagttttgtcaggattttgcttatcaacaagctgtagctattattccaggagtggcttttggtaaatatggtgaaggatatatacgtctttcttatgctgctagtatggaagttattgaaacagcaatggctagattgaaagtttttatggaatcatatgagggttagtcaaacatacggtctcgttttgtataatcgtaattatcgtgaagatgataaattagttaaaatctttacggagactgaggggaaaaggatgttttttgtaaagcatgcttcaaagtcaaaattcaatgctgtgctccaacctttgactattgctcattttattttaaaaattaatgataatggtctttcttatattgatgattataaagaagttttagcatttcaagaaaccaattcagacttgtttaagttgtcatatgcgagttatattacttctttggctgatgtggctattagtgataatgtagcggatgctcaattatttattttcctaaagaaaacgttagaattgattgaggacggtttagattatgagattctaacgaatatttttgaagtacaactactagagaggttcggtgttgctttaaattttcatgattgtgttttttgtcatagggtaggattaccttttgatttttcacacaaatattctggattattatgtccaaaccattattataaagacgagagaagaaaccacctagatcctaatatgctgtacttaatcaatcgttttcagtcaattcaatttgatgatttacaaacaatttctgtgaaacctgagatgaaacttaaaattcgtcaatttttggacatgatttacgatgaatatgtagggattcatcttaaaagtaaaaaatttattgatgatttgtctagttggggaagtattatgaaatcagattaagttgtaaagaggaacatgacattagtgtcatgttcttttttttaatattaggataaactaatatggaattaatttttaggatatttgagatgaaaaaaacattatacattaccaataaactcttttttgctaactggtttgtgccagttattggtgcagttctaattcaagttatcggcatcattgtaagtagacgccttgtagtaaaattgctacctgatgattataaattcaatttatacattgcgcttttactatttgttcctattttggcaagtattttactatttttaatctattttcaaaaaagggattttacttccttgggatttactaaagataataatgttttaacaacgatctcaggatttattactggtagtttactgatgttttttatttatatttgccactggttatcaggttttgtggaaatttcttccagcaattccttttcttttggaccttttttctttttatttcttgcatactttatccaaagcttgacagaggaaattttatttagaggatatgttatgacaacagttaccaaatttaaaggtagttttgcaggtgttttatgtaattctatgttgttttcttttatccactttagaaactatggtatcacagcaatagcactttttaatttatttttacttggtattattttttctattctttttaatatgaccaaaaatattctttttgttacaggagttcatactacatggaattttactatgggatgtgtattaggtaataaggttagtgggggggattctcctgtttctctttttagaattactgaaaattctagctttgctctttggaatggtggggattttggttttgaagggggagtactatgttctttgatattagtaggttgtttagcatacttttctttggaaagcgtgagagtatctgttagatattagctattattgccttcttgtgaaaaaaataaagaaacgtgctataatatagccactaagtttttatgaggagttcattcatgaagaaaattgctatagatgctatgggtggagattacgctcccaaagctattgtagagggtgttaatcaagctatttcagattttagtgatattgaagtacaactctatggcgatcagaaaaaaattgagaaatatttaacagtaacggagcgagttagtattattcatactgaagaaaaaattaattctgatgatgagcctgctaaagctgttcgtcgtaaaaaacagtcttcgatggtcttaggagctaaggcagtcaaagatggtgttgcacaggcctttatttctgcagggaatacaggagctttattagctgctggtttgtttgtagtaggacgtataaaaggtgttgatcgaccaggcttaatgtcaactatgcctacgttagatggtgtgggttttgatatgcttgatttaggagctaatgcagaaaacacagcttctcatcttcatcaatatgctattttagggtcgttttatgcaaaaaatgtccgtggtattgaagttcctcgtgtaggtctcttaaataacggaacggaagaaacaaaaggcgattctcttcataaagaagcttatgaactgttagcagcagagccttctattaattttattggaaatattgaagcacgtgatttgatgtctagtgtagcagatgttgttgtcactgatggttttactggaaatgctgttctaaagacaatggaaggtacagctatgagtattatgggaagcctaaaatcttcaattaaatcaggtggcgtgaaagctaaattaggagcacttctattaaaagatagcctatatcagctaaaagatagtatggactattcaagcgcgggtggagcggttctttttggtttaaaagctccaatagtaaaatgccatggatcaagtgattctaaagctgtttattctactttgaagcaagttcgtacaatgttggaaactcaagtagttgatcaattagttgatgcctttacagatgaataggagtgaactcatgtcaagagatgaagtttttgaaaagatgctggaattattaaggcagcaacttggtgacccacagttagatatcacaccagagtcatcgttacatgatgatttagcaattgactctatcgctttaacagagtttattatcaatttggaagatgtgtttcatctagagattccagatgaggctgtcgaacacatgtcaagcgtccaacaactattagattatatcattgaacataagtaataataaaaaggaagaaaatacgaacgtttcttcttttttttgattttaaataaagtttttgttgtattagataatgttgtgtgttagaataactcttaaaataagagaaaggcgaataatcaagtgactaaccagcttatttatacaggaaaagcgaaagatatttatagtacaaaagatgaaaatgtgattagaacggtctataaagaccaagctactatgttgaatggagctcgtaaggagactattgatggcaagggagcactaaataatcagatttcatctcttatttttgagaaattaaatatggctggtgtggtgacacattatattgagcaaatttcaaaaaacgaacaattgaataaaaaagttgatattattccacttgaggtggtgctacggaatgtgacagcaggctcattttcaaaacgttttggagtggaagaaggacacgttcttgaaacgccaatcgtggaattttactacaaaaatgataatctgaatgatccttttatcaatgatgagcatgtgaagtttttgggtattgttaatgatgaggagattgcttatctgaaaggagagactcgccatattaatgaactcttgaaagattggtttgctcagattgggcttaacttgattgacttcaagttggagttcggatttgacaaggatggcaaaatcatcttggctgatgagttctcacctgacaactgccgtctctgggatgctgatggtaatcatatggacaaggatgtttttcgtagggatcttggtagcttgaccgatgtctatcaagttgtacttgagaagttgatagcattgtaattagaagaggaaggaattgaatccgttcgggaaactcagaaaaaagattgggcttactgaaatctcaatttcagacgtcctcctattttcgagtcgctcccttgtcggacttggtatcttatatgaataaacgtatttttgttgagaaaaaggctgactttggcattaaatcggctagtcttgtgaaagagttgacgcataatctacaactggcttctttgaaggatttgcgtatcgtgcaggtctatgatgtcttcaatttggctgaggatttgctggcgcgtgctgagaagcatattttctctgagcaggtgacagaccgtcttttgacagaagctgaaatcactgcggagcttgataaggttgccttctttgccattgaggcgcttcctggtcaatttgaccaacgtgctgctagttcgcaagaagctttgctattgcttggaagtgacagtcaggtcaaggtcaatacagctcagctttacttggtcaataaggatattgcagaagcagagcttgaagccgttaagaactatcttttgaatcccgttgattcacgtttcaaggatattaccttgccacttgaagtgcaggctttctctgtgtctgataagacaatctctaatcttgatttcttcgaaacttatcaggctgacgattttgcagcctataaggcagagcagggattggctatggaggtcgatgaccttctcttcatccaagattatttcaaatcaatcgggcgtgtgccaactgagactgagttgaaagttttggatacgtattggtcagaccactgccgtcacacaacctttgaaactgaattgaaaaacattgatttttcggcctctaaattccaaaaacaattgcaggcgacttatgacaaatacattgccatgcgtgatgagcttggtcgttctgaaaagccgcagacacttatggatatggcgactatctttggtcgttatgagcgtgccaatggtcgtctggacgatatggaagtctcagatgaaatcaatgcctgctcagttgaaattgaagtagatgttgatggtgtgaaagagccttggctcctcatgtttaagaacgagactcacaaccacccaacagaaattgagccatttggtggagcggcgacttgtatcggtggtgccattcgtgacccattgtcaggacgttcatacgtttatcaggctatgcgtatttcaggcgcaggagatatcacgactccgattgcggaaacacgtgctggtaaattgccacaacaggttatttctaagactgcggcgcacggctattcttcatatggtaaccaaattgggcttgcgacaacttatgtgcgtgagtacttccaccctggcttcgtagctaaacgcatggagcttggagctgtggttggtgctgcacctaaggaaaatgtggttcgtgaaaaaccagaggcaggcgatgtggttgtcttgctcggtggtaaaacaggtcgtgacggtgtcggcggtgcgacaggttcatctaaggttcaaacggttgaatctgtggaaacagctggcgcagaggtacaaaaagggaatgccatcgaagaacgtaagattcaacgccttttccgtgatggtaatgtcactcgcctaatcaagaaatcaaatgacttcggtgcaggtggtgtctgtgttgccatcggtgaattagctgatggtcttgaaatcgatttggacaaggtgccacttaaataccaaggtcttaatggtactgaaattgctatctcagaatctcaagaaaggatgtcagttgttgttggtccaagtgatgtggatgccttcatcgcagcctgtaacaaggaaaatatcgatgcagttgttgttgcgacagttactgaaaaaccaaatcttgtcatgacttggaatggtgaaacaattgttgatttggaacgctgtttccttgataccaacggtgttcgtgtcgtagttgatgccaaagtcgttgacaaggacttaacagttccagaagcgcgcacaacatcagcagagacacttgaagcagatatgcttaaggtcttgtctgacctcaatcacgctagtcaaaaaggtcttcaaactatctttgactcatctgttggtcgttcaaccgttaaccacccaatcggtggtcgttaccaaatcacaccgacagaaagttctgttcaaaaattgccagttcaatatggtgtgacaacaacagcatctgttatggctcaaggttacaatccttatattgcagagtggtcaccttatcacggtgctgcctatgctgttattgaagcgacagctcgcttggtagcaacgggtgctgactggtctcgtgcacgtttctcttaccaagagtatttcgagcgtatggataaacaggcagagcgttttggtcagccagtatcagctcttcttggttctattgaggctcagattcaatttggtttgccatcaatcggcggtaaggactctatgtctggtactttcgaagaattgacagtaccaccaaccttggtagctttcggtgtgacaacagcggacagccgcaaggttctctctcctgagtttaaagcggctggtgagaatatctactacattccaggtcaagctatttcagaagatattgattttgaccttatcaaggctaactttagccagtttgaggctattcaagctcaacataagattaccgctgcctcagccgttaaatacggtggtgtcctagaaagtcttgctctcatgacttttggtaaccgtatcggtgcttctgttgaaattgcagagcttgacagcagcttgacagctcaactcggaggctttgtctttacatcagttgaggaaattgctgacgttgtgaagatcggtcaaactcaggcagactttacagtcactgtcaatggaaatgacctagctggtgcaagccttctatcagccttcgaaggtaaattagaagaagtttacccaacagagtttgaacaggtagatgctattgaggaagttcctgctgtggtatcagatgttgttatcaaggctaaggaaattattgaaaaaccagtagtttacatcccagtctttcctggtactaactcagagtacgattcagctaaggcctttgaacaggttggagctagcgtcaacttggtgccatttgtaaccttgaatgaggctgctattgctgagtcagttgatacgatggttgctaatattgctaaggcaaatatcatcttctttgctggaggtttctcagcagcggatgaaccagatggctctgctaagtttatcgtcaatatcttgcttaacgagaaggttcgcgcagctattgacagcttcatcgaaaaaggtggccttatcatcggtatctgtaatggtttccaagcccttgttaaatcaggtcttcttccatacggaaacttcgaggaagctggtgagacaagtccaaccctcttctataacgatgctaaccagcacgttgcaaagatggttgagactcgtatcgcaaataccaattcaccttggttggcaggagttgaggtcggcgatattcatgtcattccagtttcacacggtgaaggtaaatttgttgtcagcgcttctgaatttgcagagctaagagacaatggtcaaatctggagccaatatgtggactttgacggacaaccatctatggattctaaatacaatccaaacggctctgtcaatgccatcgaagggattaccagcaagaatggtcaaatcatcggtaagatggggcactcagaacgctgggaagacggactcttccaaaatatccctggaaacaaagaccaaaaactctttgaaagtgctgtaaaatactttacagggaagtgagagtgggacaaaaatcggtaattccaaaggaattcgattttgtcgtccccctccgcacagttgagtggggctgtaagagttgatttatcagcgaattagagcccactcaacccctacgttttgcgaactagattataaaaaatatggaggcttaggacttttgtcctagctttagccctcgccttgaattagtgaaggcgaggttagatagaaattcgctatcttttgaacgaagcgagcttaaccgtatctttccgccgtattggtatttgggagtcattgagactaaggttcaatggctagcttgatagattttctattttaatgttggcattgatgacgacagatccaaaattgagaaaatcatcaaagctacttaagaagagatacaaaaagaattaggaaaaaagaatgacatacgaagtaaaatctctaaatgaagaatgtggagtctttggtatctgggggtatcctcaggcagctcaagtcacttactttgggcttcatagccttcaacatcgcggtcaagaaggagctggtattatttcaaatgataatgggaaactctatggttatcgaaatgttgggctcctttctgaagtttttaagaatcaatctgaattagataatttaactgggaatgcggctattggacatgttcggtatgctactgcaggttctgcagatattcgcaatattcagccttttctttataaatttcatgatgggcaatttgctttatgtcataatggtaatttgacaaatgctatttcctcaaggaaagaattagaaaagcaaggtgcaattttcaatgcctcctcagatactgaaattttaatgcatttgattcgtcgaagccataacccaagttttatggggaaggtaaaagaagctttaagcactgtaaagggaggtttcgcctatctactgatgacagaagataaattaattgctgctcttgaccctaatgcctttcgtcctttgtcaattggacaaatgcaaaatggtgcctgggttatttccagtgagacctgtgcttttgaggtggtaggcgcaaaatgggttagagatgttgaacctggtgaagttattcttatagacgatagtggtattcaatgtgatcgttatactgatgaaacgcaactggcaatttgttcgatggaatatgtctattttgcaaggccggattcaactatacatggtgttaatgttcatacggctcgaaaaaatatgggaaagcgtcttgcacaagaatttaaacaggatgctgatattgtaattggtgtcccaaattcgtccttatcggctgctatgggctttgctgaagaatccggattaccaaatgagatgggccttgtaaaaaatcagtatacgcagcgaacctttattcaaccgacacaagaattaagggaacaaggtgttcgaatgaaattatcagcggtatctggtgttgtcaaaggaaagcgcgttgttatgattgatgactcaattgtaagaggaacgacttctagaaggattgtaggattattaagagaagcaggagctactgaagtacatgttgctatagctagtccagaattaaagtatccttgtttttatggaattgatattcaaacaagacgagaattaatttcagcaaatcacgctgttgacgaagtgtgtgatattattggcgcagatagtctaacttatctatcaatcgatgggttaattaaatcaattggactcgaaacaaaagcaccaaatggtggtttatgcgtagcttactttgatggacattatccaacaccgctttatgattatgaagaagaatacctcagaagtttagaagaaaaaacaagtttttatattcaaaaagtgaaataagctctgctaattatataaggagaaaacatgtctgaaaaaaatgcttatgcccagtctggtgttgatgtagaagcgggctacgaagttgtcgaacgtatcaagaaacacgttgctcgcacagaacgtgctggtgtcatgggagctctcggtggctttggtggtatgtttgacctgtcacaaacaggtgttaaagaacctgtcttgatttcagggactgacggtgtcggaactaaactcatgcttgctatcaagtacgacaagcacgacacaatcggtcaagactgtgttgccatgtgtgtcaacgatattattgcagcaggtgctgagcccctttacttccttgactatgtcgcgactggtaaaaacgaacctgccaaattggaacaggttgtcgctggtgttgctgaaggttgtgttcaagctagcgcagctcttatcggtggtgaaacggctgagatgcctggtatgtatggcgaagatgattatgaccttgcaggctttgctgttggtgtggctgaaaaatctcaaatcatcgacggttcaaaggtaaaagaaggggatattcttcttggacttgcttcaagtggtatccattcaaatggttattcattggtacgtcgtgtctttgctgactacactggtgatgaggtgcttccagagcttgaaggcaaacaactcaaggatgtccttcttgagccaactcgtatctatgttaaagcagctctgccattgatcaaggaagaactagttaacggtatcgcccacatcacgggtggtggttttatcgagaatgttcctcgtatgtttgcggatgatttggctgcggaaatcgatgaggataaggtgcctgtacttccgattttcaaggcgcttgaaaaatatggtgacatcaagcacgaagaaatgtttgaaatcttcaacatgggtgtcggtcttatgctggatgttaaccctgaaaatgttgaccgtgtcaaagaacttttggacgaaccagtctatgaaatcggtcgtatcatcaagaaagcagacgatagtgtggtgattaaataagtcactaaattttataagaaaggagtgtttagttagtttgcctaactgaacacgggattaaatttctaggaaaaaagataaaacgacttagacgcaagcgtcgttgttcgttttcctatttttctacgaaatttttcggcaagccgaatcatccctttgtatcgaatatgaaaatcgctgtttttgcttctggtaatggttccaactttcaggtcatagcagagcagtttcaagttagttttgtcttttcagatcatcgtgatgcctatgttttagagcgtgctcagaacttagccattccaagcttcgcttttgaactcaaagagtttgagaataaggcggcttacgagcaagccgtcgttgatttgttggacaaacacgagattgacttggtctgtctggcgggctacatgaagattgtcggagaaaccttgctctcagcctatgaagggcgtatcatcaatattcacccaacctatctgcctgaatttccaggtgctcacggtatcaaggatgcttgggaggcaggtgttgaccagtctggtgtgaccatccattgggtggactctggtgtggataccggtcaggtcatccaacaagtgcacgtgccacgcctagcagatgatagtctagaaagctttgaaacccgcatccacgaaaccgaataccaactctacccagctgtcttagatagcttgggcataaagagaaaatagtaaaatttgttataataagctaatgaaactagtgaaaaatttagagatagtagagtctatttttggtgattgggacgagaccataatctggtcgtgtgtccaaggtattatgggagaagtttttgtagatagtttagaccaaccaaaatcttctttggcaaaattgggaaggaaatcatcttttggttttctagcaggtcagcctactttatttctactagaagtttgctctggggaggatattatccttgttcctcagcataaaggatggtcagatttgattgaatcaacttatggtcagaatgctcattcttttaagcgttatgcgacgaaaaaagatactttgtttgagcgaagtaggttagagaagtttgttactcagttgccaaatggttttgaattacgtgctattgatgagaaagtttacaactcttgcttagaaaaggaatggtcacaggatttagtagcaaattacgctacttatcagtactataaaaaacaaggtataggttatgttgtatattatcaggggaatatcattgcaggagcttcatcttattcaacctataaaaatgggattgagatagaagtagatacgcatccagattttcgtcggcgtggtttagcaacaatagttgcagctcagttaatactaacttgtttagataagggaatttatcctagctgggatgctcatacaaggacttcattgaatttatctgaaaaactcggttatgaattttctcatgaatacatagcctatgaaatagattgaagtaagaaaaggagaactcatgactaaacgtgctttaatctcagtttctgacaaatcaggaattattgactttgcaaaagaattgaaaaacttgggttgggatattatctcaactggtgggactaaggttgcccttgatgatgctggtgttgagaccattgccatcgacgatgtgactggattcccagaaatgatggacggtcgtgttaagaccctccacccaaacattcacggtgggcttctggctcgtcgcgacgctgacagccaccttcaggctgctaaggacaacaatattgagttgattgacctcgtggttgtcaacctctatcccttcaaggagaccatccttcgcccagacgtgacctacgatttggcggtggaaaatatcgacatcggcggtccatcaatgcttcgctcagctgctaaaaaccacgctagcgtaaccgttgtggttgattcagctgactatgccactgttttgggagaattggctgacgctagtcagacgacatttaaaactcgtcaacgcttggcagctaaggccttccgtcatacggcagcctacgacgctttgattgctgagtacttcacagctcaagtgggagaggctaagcctgaaaaattgaccatcacttatgaccttaaacaggctatgcgttacggagaaaatccacagcaagacgctgatttctaccaaaaagccttaccaacagactactcaatcgcttcagctaaacagctcaatggaaaagaattgtccttcaataatatccgtgatgctgatgcagcaatccgtattatccgcgatttcaaagacagtccaacggttgttgccctcaaacacatgaacccatgtggtatcggacaggctgatgatattgagacagcttgggattacgcttatgaagctgatccagtttcaatctttggtggaattgttgtccttaaccgtgaagttgacgcagcgacagctgagaagatgcaccctatcttcttggaaatcatcatcgcaccatcatactcagaagaagcgctagctattctcacaaataaaaagaaaaacttgcgtatccttgagttgccgtttgatgcccaagctgccagcgaagtggaagctgagtacactggcgtagttggtggacttttggtgcaaaaccaagacgttgtggctgaaaatccatctgactggcaagtggtgacagaccgccagccaacagaacaagaggcgactgcccttgagtttgcctggaaggctatcaagtatgttaagtctaacgggattattattactaacgatcacatgacgcttggactcggtgcaggtcaaaccaaccgtgtcggctcagtcaagattgctatcgagcaggctaaggaccaccttgacggtgccgttctagcatcagatgccttcttcccatttgcggacaacattgaagaaatcgctgccgcagggatcaaagcaatcatccaaccaggtggttcagttcgtgaccaagaatctattgacgccgcaaacaaacatggcttgaccatgatcttcacaggcgtgagacattttagacattaaaaaatagtagtttaggttttcttaagttaactcaggtatactacgtatatcctaaaaacttttctttttattaaacctcctaagtactcatcaaggtgagtactttttttgatattttgatttaaattttcgaataagttaattgcaagtgtttgagcacttcattatattaattctatttggaggtttttcttgaataaatggttagttaaggcaagttccttagttgttttaggtggtatggttttatctgcgggttcccgagttttagcggatacttatgtccgtccaattgataatggtagaattacaacaggtttcaatggttatcctggacattgtggggtggattatgctgttccgactggaacgattattagggcagtggcagatggtactgtgaaatttgcaggagctggagccaacttttcttggatgacagacttagcaggaaattgtgtcatgattcaacatgcggatggaatgcatagtggttacgctcatatgtcacgtgtggtggctaggactggggaaaaagtcaaacaaggagatatcatcggttacgtaggagcaactggtatggcgacgggacctcaccttcattttgaatttttaccagctaaccctaattttcaaaatggtttccatggacgtatcaatccaacgtcactaattgctaatgttgcgacctttagtggaaaaacgcaagcatcagctccaagcattaagccattacaatcagctcctgtacagaatcaatctagtaaattaaaagtgtatcgagtagatgaattacaaaaggttaatggtgtttggttagtcaaaaataacaccctaacgccgactgggtttgattggaacgataatggtataccagcatcagaaattgatgaggttgatgctaatggtaatttgacagctgaccaggttcttcaaaaaggtggttactttatctttaatcctaaaactcttaagactgtagaaaaacccatccaaggaacagctggtttaacttgggctaagacacgctttgctaatggtagttcagtttggcttcgcgttgacaacagtcaagaactgctttacaaatagtttgaggtattgattcattgttttaaatgacagttgtgttactaactaagtacaatttctttaaaccgtctgaaaataattttatagtccagtaaagtgtgatattatagtctcggactaataaaaaggaaataggaattgaagcaatgaaaatgaataaaaaggtactattgacatcgacaatggcagcttcgctattatcagtcgcaagtgttcaagcacaagaaacagatacgacgtggacagcacgtactgtttcagaggtaaaggctgatttggtaaagcaagacaataaatcatcatatactgtgaaatatggtgatacactaagcgttatttcagaagcaatgtcaattgatatgaatgtcttagcaaaaataaataacattgcagatatcaatcttatttatcctgagacaacactgacagtaacttacgatcagaagagtcatactgccacttcaatgaaaatagaaacaccagcaacaaatgctgctggtcaaacaacagctactgtggatttgaaaaccaatcaagtttctgttgcagaccaaaaagtttctctcaatacaatttcggaaggtatgacaccagaagcagcaacaacgattgtttcgccaatgaagacatattcttctgcgccagctttgaaatcaaaagaagtattagcacaagagcaagctgttagtcaagcagcagctaatgaacaggtatcaccagctcctgtgaagtcgattacttcagaagttccagcagctaaagaggaagttaaaccaactcagacgtcagtcagtcagtcaacaacagtatcaccagcttctgttgccgctgaaacaccagctccagtagctaaagtagcaccggtaagaactgtagcagcccctagagtggcaagtgttaaagtagtcactcctaaagtagaaactggtgcatcaccagagcatgtatcagctccagcagttcctgtgactacgacttcaccagctacagacagtaagttacaagcgactgaagttaagagcgttccggtagcacaaaaagctccaacagcaacaccggtagcacaaccagcttcaacaacaaatgcagtagctgcacatcctgaaaatgcagggctccaacctcatgttgcagcttataaagaaaaagtagcgtcaacttatggagttaatgaattcagtacataccgtgcgggagatccaggtgatcatggtaaaggtttagcagttgactttattgtaggtactaatcaagcacttggtaataaagttgcacagtactctacacaaaatatggcagcaaataacatttcatatgttatctggcaacaaaagttttactcaaatacaaacagtatttatggacctgctaatacttggaatgcaatgccagatcgtggtggcgttactgccaaccactatgaccacgttcacgtatcatttaacaaataatataaaaaaggaagctatttggcttcttttttatatgccttgaatagactttcaaggttcttatataatttttattaaattgaggagattaagctataagtctgaaactactttcacgttaaccgtgactaaatcaaaacgttaaaactaaaatctaagtccgtaaagattattgaaaacgctttaaaaatagatataataaggtttgtagatatctaaaattaaaaaagataaggaagtgagaatatgccacatctaagtaaagaagcttttaaaaagcaaataaaaaatggcattattgtgtcatgtcaagctttgcccggggagcctctttatactgaaagtggaggtgttatgcctcttttagctttggcagctcaagaagcaggagcggttggtataagagccaatagtgtccgcgacattaaggaaattcaagaggttactaatttacctatcatcggcattattaaacgtgaatatcctccacaagaaccatttatcactgctacgatgacagaggtggatcaattagctagtttagatattgcagtaatagccttagattgtacacttagagagcgtcatgatggtttgagtgtagttgagtttattcaaaagataaaaaggaaatatcctgaacagttgttaatggctgatataagtacttttgaagaaggcaaaaatgcttttgaagcaggagttgattttgtgggtacaactctatctggatacacagattacagccgccaagaagaaggaccggatatagaactccttaataagctctgtcaagccggtatagatgtgattgcggaaggtaaaattcatactcctaagcaggctaatgaaattaatcatataggtgttgcaggaattgtagttggtggtgctatcactagaccaaaagaaatagcggagcgtttcatctcaggacttagttaaaagtgttactcaaaaatcaaaatcaaaataaaaaaggggaatagttatgagtatcaaaaaaagtgtgattggtttttgcctcggagctgcagcattatcaatgtttgcttgtgtagacagtagtcaatctgttatggctgccgagaaggataaagtcgaaattacgtggtgggcttttccaacctttactcaagaaaaggctaaggatggagtaggtacttatgagaaaaaagtcatcaaggcttttgaaaagaaaaatcctaatataaaagtaaaactagagacaattgatttcacatctggacctgaaaaaatcactacagcgattgaagcagggacagcacctgatgtgctttttgatgcaccagggcgaattattcaatatggtaaaaatggtaaattagcagatttgaatgatttatttacagaccaatttattaaggatgtcaataataagaatatcattcaagcttctaagtctggcgataaagcctacatgtatccaataagttctgccccattttatatggcgttcaataaaaaaatgcttaaagatgcaggagttttgaaactcgtaaaagaaggttggactactagtgattttgaaaaagtactaaaagcactaaaaaataaaggctatacaccaggttcattctttgcaaacgggcaaggaggagatcaaggaccacgtgcattttttgctaatctttatagtgctccaataacagataaagaagtaacaaaatataccactgacactaaaaattctgtaaaatcaatgaaaaaaatagttgaatggattaagaaaggctacttgatgaatgggtctcagtatgatggctcagctgacattcaaaactttgccaatggacaaactgctttcactatcctatgggctccagctcaacccaaaactcaagcaaaattattagagtcaagtaaagtggattaccttgaagtgccattcccatcagaagatggaaaaccagatttagaataccttgttaatggttttgcggtctttaataataaagatgaaaacaaagtaaaagcctctaagaaatttatcacttttattgctgacgataaaaaatggggaccaaaagatgttatacgtacaggtgctttcccagttagaacatcatttggagatctttataaaggtgataaacgtatgatgaagatttcaaaatggactcaatattattcaccatattacaacactatcgatggattttctgaaatgagaaccttatggttcccaatggttcaatctgtatccaatggtgacgaaaaaccagcagatgctttgaaagactttactcaaaaagcaaatgataccattaaaaaagcagctaaataattaaggagactccttttctatggtcaatcacatattgggatagaagaggagtttttagtcaagttaagatgtaaaggagagtaccgtatgcgtactaataagttaaagatgagggaaacgatgatagcttatgcttttctagcacctattctcttatttttcttaatttttgtttttgcaccgatggttatgggctttgtcactagtttttttaattattctatgacacagttcacttttattgggttagctaattacaatcgtatgtttcatgattctattttcatgaaatccttgataaatacagtaatcattgtgattggctctgtgccagtagtggttttcttctcactttttgttgctgccaatacttatgaaaaaaatgttttttcacgctctttctaccgttgtgtcttcttcttgccagtagtaactggtagtgttgcagttacagttgtttggaaatggatttatgaccctatgtccggaattttaaattacatcttgaaatcaggtcatgtcattgaacagaatattagctggcttggggataagcactgggcattgcttgctattattattattttgctaacgacctcagttggtcaacctattattctatatattgcggcgatgggaaatattgataattctctttgcgaagctgcgcgtgttgatggagccaatgaaatgcaagttttttggcaaattaaatggccgagtctcttaccaactacactctatattgcagttataacaacaattaattcatttcaatgttttgccttaatccagctcctaacatctggtggaccaaattattcaacaagcactttgatgtattatctttatgaaaaagcctttaaactatcagaatatggctatgctaatactatgggagtattcctagcagtaatgattgctttaataagttttgctcaatttaagatcttaggaaatgatgtggaatattaggaggaaaacatgaaaaagaaaacattcagtgcttataactttttaacggctcttatcctttgtcttttgacagtgctttttatctttccattttattggattatgacaggagcttttaaatctcaacctgatactattatcatccccccacaatggtggcccaaagcaccgaccttagaaaattttaaagctttaactgtacaaaacccagctttgagatggctttggaatagtgtctttatctcaattatgacaatgttcctagtttgctgtacatcgtcaatggcaggctatgttttagctaagaaacgattttacggtcaaaaaatattgttctccctttttattgctgctatggctttacctaaacaagttgttttagtgccattagttagaattatcaattttatggggatacatgataccttatgggcggttattttacctcttgttggttggccttttggggtcttcttgatgaaacagttttctgaaaatattccaacagaattactggaatcagctaaaattgatggttgtggagagattcgaacatttattaatgtagcatttccaattgtcaaacctggatttgctgccctagctattttcacatttatcaatacttggaatgactattttatgcaattagttatgctaacttctagaaataatctgaccatttctcttggggtagctactatgcaggctgaaatggcaacaaactatggcttaattatggcaggtgcagccttagctgctgttcctattgtgacagtattcttagttttccaaaaatcctttactcaggggattacaatgggagctgttaaaggataggtaggatttattatgatttacgatcatttattgaatttaacgcattataaagatattaatcctaatttagatttagcgattgattatctactaagtcatgatttaaggaatttagatataggcacctatcatattagcccagaagtgatactcatggtccaatcaaatcaacttagtgagtcatttgatcatatttttgaataccataaaaaataccttgatatacattatgtcattgaaggacatgaagttatcaaattgggaaaaggtgataaggtagaggtggaggaatacttaggcgatataggatttatcaagtgctcagaagagacttcttttgatttgagagataattatatagccttctttttcccagaagaagctcatcagccaaatggtatgggaagtctaggtaattatgtcaaaaaaggggtattgaaagtgttaatggcgtaagaaatacagggagtatattgtgaaaaaagcaaatcaattaatagcagcgatttttgatgttaacaacccctttatgcaaggttgcaatgttgtttttgatctggcattactaaaccttctctttatgataacttgcctaccattggtaactattggtgctgctaaaattagtttgtatcgaacgttgtggcaaaaattagaaggtgatcagacaaatcttttaatattgtatataaaacacctaaaaaaagagtggttccaaggtatgcttttaggtttggttgaactaagtattttggttgtgatcatatttgatttaacaattcttcattatcaaataggtttcattgtgtctttcttgaagataacttgttacgcctttttgttattgactgtgatgacgagcatatacctatttcctatggctgcccgctacgaaatgtctcttttagataccgtgaaaaagagctttataatggcatgtttaaacttgaaatggactggtgtattgatgtttttattaatcatgacttggtttattatggtgcagtctagtctcttatttatgcttacagtgtcagctatatttatttttgcttataccgcctttgcttactttaaaattattattttacaaaaacaatttgcctatttcagcaaacaacaaggagattatcaatgaaagatttacaaaaatatcaaggaattattcctgcattttatgcttgctatgatgataagggtgatatttgtcccgaacgagtaaaagccctgaccaattattttattgataaaggtgttcaaggactttatgttaatggttcatccggagaatgtatttaccaaagtgtagcagatcgtaaacttgtactggaaaatgttatgtccgttgctaagggtaaactaacagtaatagcgcatgtggcatgtaataatactaaggatagcgtagagttggctatgcatgctgaagctataggtgttgatgctattgcagcaattccaccaatttattttcgattaccagagtatgccatagcagattattggaatactattagtcaagcagcaccacaaactgattttattatttacaatattcctcaattggcaggggttgctttgacatcggatttatatcgaaaaatgttacaaaatccgcaagtaattggtgttaaaaattcttccatgccagttcaagacattcagaattttgtggctattggaggagaaaatcatattgtttttaatggtccagatgaacaatttttgggtggtcgtctcatgggagccgctgcaggtattggtggtacctatggcgtaatgccagaattatacttgactttaaatcagttaattgttgataaagatttagaaaaagcgcgtgaacttcaatttacaattaacgatattatcacaaagctttgttcgggtcatggtaatatgtatgctgtgatcaaagctgtattggaaatcaatgagcaactaactataggttccgttcggttacctttagcatctgtaacagaagaagataaacctattattaaagaggcagcagaaatgattagacatgctaaaaaacagttttgttaaagtgaggtagataattatgaccagaacagtagcaattgatattggcggtacaatgattaagcatggcattgtggataatttaggttgtattgttgaggcaagtgagcttgccacagaagcctacaaaggtggtccaggcattttacaaaaagtttgtcaaattatcgataactatctagcagaagggagcattgatggaattgctatctcatctgctggcatggtagatccagatgaaggatgtatattttactctggtcctcaaattccaaactatgctgggacacaatttaagaaagttttagaagacacttatcaagtacgcacagaaattgaaaatgatgttaattgtgcaggattagctgaagctgtctcaggtagtgccaaagatagttcaatagcgctttgtcttactattggaacaggtattggtggttgtctgattattgataaaacagtttttcatggctttagtaattctgcttgtgaagttggctatatgcacctttcagatggtgattttcaagatttagcctctacaactgcactgattgctgatgttgccaaagcgcatggagatgaaattagccgatgggatggacgtcgtatttttcaggaggctaaaaaaggcaatgaaaaatgtattgcaagtatagaccgtatgataaactaccttggccaaggaatcgctaatatggtttatgtggtaaatcctgaaaaagttgttttaggtggtggaatcatggctcaaaaagattatttacaagataaacttagtgaatctttgaaacgaaatcttgtgacaagtcttgctgaaaaaacagcaatagtctttgcacaacacgaaaaccaagctggtatgctaggagcttactaccattttaaaaacagggggtgacgggtatatgattgaaacaatgtcgctagatgacatgagagaatacctaggtcaagaccaaattcccgaggattttgatgacttctggaaaaaacaaacaatgaaatatcaagggaatattgagtatcgtctagacaaaaaagatttcaatattacttttgcacaagcttatgatcttcattttaaaggcagcaataactctattgtctatgccaaatgtttattccctaaaacaaataaaccctatcctgtagttttttattttcatggttaccaaaaccaaagtcctgactggagtgaccaacttaattatgtagcagcaggttacggcgttgtttcaatggatgttcgaggtcaagctggacagtctcaagacaaggggcattttgatggcattacagttaagggccagattgtgcgaggaatgatctcaggaccaaatcatcttttttataaagacatttatcttgatgttttccaattgattgatatcattgctacattagagagtgttgatagtaatcaactttatagttatggctggtctcaaggtggagcacttgctttgatagctgcagctcttaatcccaaaatcgtcaagaccgttgctgtttacccatttttgtcagactttagacgagtattagatttagggggtgtcagtgagccctatgatgaactcttccgctattttaaatatagtgatccttttcataaaacagagaataatgtgttaaaaactttggcttatattgatgttaaaaattttgcacataggatttcttgccccgttgttttactaacagccttaaaagatgatatttgtcctccatcaactcaatttgccatttttaatcgtctgacatcaactaaaaagcatcttttattaccagattatggacatgatccaatgacagtgcaagtaaaagaccatatttttgatcaactgacaggaagtcaatttacaaagcaaaaaatcgagtagattatttctactcgattttcatttagcgttgaataatggtttctctaaaaattcgctctttttctattttattaatatctaaaaattgtgcatagataatatctaccatgattaacattgggatctgaggcgaaattctattgccgtagtctaaatgcctagcagaagccacctgaataatcttgtcaaaagcatagtcaattgtgtgaggttgttttgtaaatagaacggttttagctccgtgacaacttgcgatttttaaggcaccaataacagagttggtgttcccagaaagtgagaaggcaatgacgaggcatctatcattaacaatactattagtccatgagaaactatctgtatcatccagagcctcacaaatcactcccagcctcataaggcgtattttaaattctttagctactagcgatgagctccctttgccataaaaataaacacgatcagcttgctcaatcatatgtgatacttctagaagctgttcttcatcaataatatcagcagatttagaaatcatctcttgataattcataaatactttcttagtgttgtcattttgaagaccgtataattgttgactgatggtctcatggctttttaaatattcaaaaacaaattcacgatagcctttaaacccacattttttagcaaaacgcgttaaggctgcttgtgaaatgtgtagttgcttagtgacaatggtagaagcaagagcgtcttttgaaatgggctgccccataaaataacaagcaatttcacgttctaaatcagtcattaaatcaagagcagactcaatttggtcataaatagtcataatacacggtcctctcctctttaagaaagcgcttaatatattcagtataacataaagttagtgagggaccaaactaagttctaagaaacagcaatgataagttttaaatagcaatatgaaggatcaataacataatatatgttaagtatatattatgatataaatttttcaaaaaagctgtaataaaaaaaataaaagcgaacaaatgtgttataattttataaatgatacgtttttattgaaaatttctttttatattatttaataggagttattctgatatgaaattgcttgttgttggttctggtggtcgtgagcatgcgattgctaagaagttgttagcgtctaaggatgtggatcaggtttttgtggcacctggtaatgatggtatgaccttggatggtctagacttggtaaatatcggaatttccgaacattctagactgattgactttgttaaggagaatgagattgcttggacccttattggtcctgatgatgcgctagcagctggtatcgttgatggttttaatagtgctggactcagagcatttggtccaaccaaggcagccgcggagctagagtggtcaaaagactttgccaaggaaatcatggtcaaatacaatgttccaacagcagcctatggcacattttcagattttgaaaaagctaaagcctacatcgaagagcagggcgcaccaatcgtggtcaaggctgacggattggcgttaggcaagggcgtggtcgtggctgaaaccgttgagcaggcggtagaggcggcgcaagagatgcttttggacaacaagtttggcgactcgggtgcgcgcgtggttatcgaggaattcttggatggtgaagagttctcccttttcgccttcgctaatggcgataagttctacatcatgccgacagctcaggatcacaagcgtgcctatgatggtgacaaggggctaaataccggtggtatgggtgcctatgcgccagttccccacctgcctcagagcgtggtggatacagcagttgagactatcgttaagcctgtccttgaaggcatgattgccgaagggcgtccttatctaggtgtcctctatgctgggcttatcctgacggctgatggccctaaggttatcgagttcaactcacgttttggtgaccctgaaactcagattatcctccctcgcctgacttccgatttcgctcagaacatcgacgacatcatgatgggcatcgagccttacatcacttggcagaaggacggcgtgactctgggcgttgtcgttgcctcagaaggctatccgctcgattacgagaaaggtgtgccactgcctgaaaagaccgacggcgacatcatcacctactatgcgggagctaagtttgcggaaaatagcaaagcactgctctcaaacggaggacgtgtctacatgcttgtcaccacagaagacagcgtcaaagcagggcaggacaaaatctatacccaactcgcccaacaagacacaacaggcctcttctaccgaaacgacatcggaagcaaagctattaaggaataagactactcattcaaatattagcgtcagcaaagcgaccgaaggtcgctccaaaaagaaagaagaaaggaactgaacacgggactaattttctagtgaaaaagataaatcttcctagatgctaaagcatcttcgtcagatttctgcgtcgtaggcgtctgctgctaaagcacctagtcgccctgacgtgggtacgtcttcgaaatcaaagatttcggacttaccgcatatttttctacgaaaattttcgacaagtcgaaacgtccctttgtatcttaatattatgcaaccaattatttctattatcatgggttccaaatccgactggacaaccatgcaaaaaacggctgaagttctagataactttggcattgcttacgagaagaaagtcgtctctgcccaccgtacgccagacctcatgttcaagcatgctgaggaggcgcgtggtcgtggtatcaagattatcatcgctggagcaggtggagcagcccacttgccgggtatggtagcagctaaaacaaccctgcctgttatcggtgtgcctgtcaaatcacgtgccctctcaggtttggattcgctctactctattgtgcagatgcctggtggtgtgcctgtggcgaccatggctatcggagaagcaggagcgactaacgctgccctgacagccctccgtatcctctctatcgaggatcaaaatctggctgatgcgctagctcatttccatgaggaacaaggaaaaatcgcagaggagtcaagcaatgaactcatttaagaccattgggattattggtggtggtcagctggggcagatgatggcgattgcggctatctacatgggccacaaggtcattacgctggatccagctagcgactgccctgcctcccgcgttagcgaggtgattgtggcaccttacgatgatgttgaggctttgggaacattagctgcgcgttgcgatgttttgacctatgagtttgagaatgtcgatgccgatggtctggatgccgttgtgtcagctggtcagctaccgcaggggactgatctgctccgcatttctcaaaaccgtatctttgaaaaagactttctggcaaataaggctggcgtgactgtcgctccctataaggtggtgacatctagccttgacctagaggggcttgacttgaccaagacctatgtcctcaagacagcgacaggtggttatgacggtcatgggcaaaaggttatccgctcagcagaagacctgccagaggcgcagcaattagccaactcagctcagtgtgtcttggaagagtttgtcaacttcgaccttgaaatatcagtcatcgtgtctggaaatggtcaggatgtgacggtctttcccgttcaggaaaatatccaccgcaacaatatcctgtcaaaaaccatcgtaccagctcgcatctcagaccaactagctgacaaggctaaggaaatggctgtgcagattgccaagaaactccagctatcaggaaccctctgtgtggaaatgtttgcgaccgcagatgacatcatcgtcaatgaaattgccccacgtccccacaactcagggcactactctatcgaagcctgcgacttttcacagtttgacacccacatcttgggcgtactgggcgcaccgcttccgccaatcaaactccatgctccagccgttatgttcaatgtcctaggacaacatgtccagcaggcaattgaccatgttgcccaaaaccctagcgcccacctccacatgtatggtaaactagaagcaaaacataaccgcaaaatgggacacgtgacggtgtttagcgatgtacctgatgaggtggaagagtttgaagaaaggatggatttctaaggaggtttatggaattttaggggggagaatgattttgaagggagtgttgtcagatgaatagaataataaacagggatattttacctagaatttcaaagatttctaaaaataataaagagaaagatttactatctatagcttatattacttggctaatctttataatatttgctttgggagtagttacagttaatgatttaaaaccgatgtttaatcaattaatagtaaacctcttaaatatttattattatatggaagccttcatattgggtatggacagctatttacaatataaccttccatacagttttgatttttggagtatttttgtagaggctataaatttatttgtaaaagtatttttaattgcttttattccttctgttattagaaaagtattgaaaaaagaaagttttttcaatgaagttgttattttactaggagcgattgttactataattgtaagtttccatttatatttagagatattgatagtagtgggactaatacttttattaattgcttttgtttcaataggtaagaatcgtgtttataattttgttcaaaatttaaactactttgaagaagtgatttggaattattttgaagaaaatccggttaaaataaaagaaaaatcattgattattaaatttttacttactatttcttttgtttttgtaattgattttgcaatggttagattgttgaattttaatataaaattttctacaatattagcttgttctgctattttattagcatggttataccaaaataagtctgttacagaacccttcctattaaaaaagttagttatctattttatttttttcattgccactttaattggtaatttaaaaaatgagttgtcaatcttagaaacaccattactttttattagtatattttttactatggatagaattattgctctatctaaagaaatgcgtgatttgattatatctaagagtattttattttattatgatcatgaaaatataaagccatcaatattacttagtgagataaaagaaattaagtatcttgaaaatgtagatattggagaacttgaacttgttaggcaaatggtaattaggttgcgtctagagttagaggaagaatttttgattttatcagatatatatatgaaaaatggctatgaaaaatatatacaatttgttcaaggaaatgtttattttatcaacttagaattggataaaattcccaactacactaacttgaaattaatactagaatcaatatttgatcataataatcaaaagatatttatacctaaactttatgaggaatacatatacatcttaatttctttaggagaagttgaaaaagctaaagaaatattaaaagaagtgtcggattatttaactgaagaatctttgaattattttgaaaaagaatatgataaagctaagggtagtaattagaattttttaaaggagtaaaacaaaatgatcgaacgttattcacgccctgagatggcggcaatttggacagaggaaaataaataccgtgcttggttggaggtcgagattttggctgacgaggcatgggctgagttgggtgagattcctaaggaggatgtggctaagattcgtgagaaggcggattttgacattgaccgcattcttgagattgagcaggacacgcgtcacgatgtggtggctttcactcgtgcggtttctgagacgcttggtgaggagcgcaagtgggtgcactacggtttgacgtcgactgacgtggtggacactgcctacggttacctctacaagcaggctaacgatattatccgtcgtgaccttgagaatttcacaaatattgtggctgataaggctaaggagcacaagttcaccatcatgatgggtcgtacccacggtgttcacgctgagccaacgactttcggtcttaagttggcgacctggtacagcgagatgaaacgtaatattgagcgttttgaacatgctgccgcaggtgtggaagctggtaagatttcaggtgccgttggtaactttgctaacattcctccatttgtggaacaatatgtttgtgacaaattgggcatccgtccgcaagagatttcaacacaggttcttccacgtgacctccacgcagaatattttgcagtgcttgcaagcattgcaacttctatcgaacgtatggcgacagagattcgtggtctgcaaaaatcagaacaacgtgaagttgaagaattctttgccaaaggtcagaaaggtagctctgctatgcctcacaaacgcaacccaatcggttcagagaacatgactgggctagcgcgcgtgattcgtggtcacatggtgacggcttatgagaacgtggcactttggcacgagcgtgatatttcgcactcatctgctgagcgtatcatcacacctgacacaacgatcttgattgactacatgctcaaccgttttggcaatatcgttaagaacttgactgtcttcccggaaaatatgatgcgcaatatggaatcaacttttggtttgatttatagtcaacgtgttatgctcaaattgattgaaaaaggaatgacacgagaagaagcttatgacttagttcaacctaagacagcttattcctgggacaatcaagtggatttcaaaccacttttagaagaagacaccaaagttacctcttgtcttacacaggaagaaattgatgaactatttaatccgatttattacacaaaacgtgttgatgatatttttgaaagactaggattagaaaaataagaaaattccattactggttaacgtttttttaaccagtaatggaatttttattgatttaaaaggaattaatattaaaaaacatacttaaaatgagtttattatgataatatataataagaagaaaaatttaggagttagtttttaaaggaaaatgttaaaacattttggtagtaaagtaagaaatttgagagtaactagaaatattactcgcgaagatttttgtggtgatgaaactgagttatctgtaagacaattagctaggattgaaagtggacagtcaattccaaacttgactaaagctcactacatagctaaacaattgaatgtaaaattggatattttaacaggaggagagagcttagaattacctaaacggtataaagagttgaagtatttgattttaagaattccaacttatgcagatgctgaacgattaaaattaagagaatgtcagtttgatcatattttcgaagaattctatgataatcttccagaagacgagtgcttagcaattgacagtttacaagctaaatttgaagtctatcaaacaggagacattaattttggtgtggaggttttatgcgaatgctttgataaagtaaaatataaagaaaaatatactcttaatgatttgattatcatagatttgtttttaacttgtgcagttgtatctaaatttaacaatagagcatttactaaagaagtatttcaaactatatgtaaaactttgataagtcagaaccacaaacttacagcagaagatttgttttggtttaatcatgtactcctgaattgtgtatttgttggactttgtttaaatagtgaagagtgtcttgcagaaatgttagaagttagccgacaaacgatggtgtcaacacatgattttcataaaatgcctttatattttatgtaccaatggaaatacttcattacaattgacaatgatataaagtctgcagaaaatgcttaccaacaatcaattatgttttcaaaaatgattgatgacaagcatctaattaaaaaattagaattggagtggcaagaagatataacaggacattgatgtcctgtgactctgaggtctaaaaatttataataaacgtacaaaatattatttaggagtttattatagtgattaaaaaatgttttttaatagtattacttgttctattatcaaatttaggttcatttgatttgtttttaggaatgggttggtggaatatgggctaagtaagctgttctgtgatttcttgaggttggattaactataagatcagtttattcttcctttaaataagggagatactaatacaccaacttagttcttaacttttcctatacaaatgttataataatatcatgacaagatttttagatagtgatgcaatgggtgacgaagaattggtagaacgtacacttcgtccgcagtatttaagagagtatattggacaagataaggttaaagatcagctaaaaatatttattgaagctgctaaattgcgtgatgagtcattggatcatgtgttattatttggccctcctggtttagggaaaacaaccatggcatttgtaattgctaatgagttgggtgtcaatctcaaacaaacatcaggtcccgcaattgaaaaatcaggggatttagtagccattttaaatgatttagaaccaggtgatgttctttttattgatgaaattcatcgtatgccgatggcggttgaagaggtactttatagtgcaatggaagacttctatattgacattatgatcggtgcaggagaaactagtagaagtgttcatctagatttgccgccctttaccttaattggtgcaacgacacgtgcaggtatgttatctaatcccttacgtgctcgctttggtattacagggcatatggagtattatgaagaaaatgatttgacagaaattattgagcgtacagcagacatttttgaaatgaaaattacttatgaagctgcttctgaattagcgcgtcgcagtcgtggaacgccacgtatcgctaaccgtttattgaaacgtgttcgagattatgctcaaatcatgggagatggtttgatagatgacaatattacagataaagcattaacgatgttagatgttgatcacgaggggcttgattacgtcgatcaaaaaatcttaagaaccatgattgaaatgtataatggaggtcctgttggtttaggaactctatccgttaatattgctgaagaacgagatactgttgaagacatgtacgaaccttatttaattcaaaaaggttttattatgcgtacccgtaccggtcgtgtagctacggttaaggcatatgaacatttaggttatcagcgatttgataaataaaacataagtcattttaaggctagagtatctagtcttaattttttaattttcatgcaatgttaagtattagatatgttgtagttattctttgagcagttaaacgtattataagtaccttttttctgttataatagaccaaaaggagtttgctatgaagaaagtctgttttgtttgtcttggaaatatctgccgtagcccgatggctgagtttgttatggcgaatttagataaggaggatagcctcttggttgagagtcgtgcgacttcaacatgggagcatggaaatcctatacataggggaacgcaagcgattttgcagcgttatcaaattccttacattaacgataaagggtcacaacctatttctaaagacgatttagcatattttgattatatcatcggtatggatgagcaaaatgtcaaggatttaaaagctctatcacaaggaacctatgatgataagattagtcttttttgtgatggtggtgttcctgatccatggtatactggtgattttgaggaaacctatcgtctagtcaatgatggctgtaaacagtggttaacgctaataaataatagtagagattaagtagaaatgaagaattttaaaataacacgaactcatctagaaatattatctttgataattattgttgtttttggtttatcagtatttaccttaacgacttctagtcaaggagtctttagctatgatggcggcaagataaaatatgtgggctctattgttaatcaccatatgactggtaaaggtaaattaacctatgagaatggggattactataagggcgattttgtaaatggagtctttgaagggaaaggaacatttgtttcagttcatggctggtcttatacaggtgactttaaaaaaggtcaacctgatggacaaggtcgcctcaatgctaaaaataagaaagtctataaggggacatttaaacaggggatttatcaaaaatgagaataaaatggttttctttggtacgtataacaggactactacttgttttactttaccatttctttaagaatagttttccaggaggatttgttggcgttgacatcttctttacattttctggttttctgattacggccttattgattgatgaattttctaaaacgaaaaaaattgattttgttagtttttgtcgtagacgtttttaccgtattttcccaccattagtattgatggttttggtgacaataccttttgtatttctggttaaaagcgattttagagcaagtattggctctcaaattatgactgctttaggttttaccagcaacttttacgaaatcttgactggtggtaactacgaaagtcaatttatccctcacttatttgtgcatacctggagtctttctattgaagtccatttttatgttttatggggcttaacggtatggctcttatcgaaaagatcaaaagatcaaaagcaattgagggggactttgttccttatttccatgggaatttttggagtcagcttccttaccatgtttgttagagcctttttcgttgataatttttcaacgatatatttctctacattatcacatatatttccgttctttttaggagcgatggtggctacaatatctggtattcgagagattaccggacgattcaagaaaaatatcaaaaatctgactttgaagcataatttaatcatgatgggtagtgcttttgctggtctaatgattttaacttttgcacttgattttgataatcggctaacatatctttttggttttgtattgtctagcatttttgctagtgtaatgatttacaatgcacgtattttacacgagcatacaccagatatttcagaaccttttgtgattacttatcttgctgatatcagttacggtatgtacctttttcattggccattttatattatttttagtcgtttatccccaaactggatagctgttattttgacagtagtattatcagcagtcttctcaacattatcattttatatcattgaaccttttattttaggtagaaaacctaaattccttgattatgaatttgacttgttgccttacaaaaagtggttatttagtatcggaggggtactaactcttattactgtagtgacaatgttgacagctccaagtataggtagttttgagacagaattattgcagaattcgttacaacaagctagaacaaatactaaccgaacacatacactagccgcaggggatgcaggtgctcttagtgatgtgacagtaatcggagattcagttgccttaaggtcaagtgctgcttttaataaattgttaccagaagtacaattagatgctgcggtgagtcgtaattttagtaaatcatttgatatttttgaaaaccgtattcaaaataaagccttgtccaaaattgttgttttggcagttggtgtgaattcattagataactacaagacagacttgagccaatttattaaatctttgcctaagggacaccgtttgattatagtaacaccttataatgctaaaaatatgagtcaagttacgacagtgcgtgattatgaactctcgctaatgaaaaaatataattacataacggttgctgactggtataaggttgcgacagaacatccagaaatctggggaaatacagatggtgtgcattatagtgatagcgatactacaggggctgatttatatgttagtaacgtcaaaaaagctattcaaaaatcagctcaacgagctgcaaaataaacaagtccgagtcatgtactcggctttttttgtgaaaacgaataatagatatctccgtttatggtgataaaaatgaaatcgataggctttaatctgaaaattagtaatgaaaaaacaaatataattaaagcgctttcaagaaatatttccgaaagattgaaaaaaagttcacaaaaaagttgtgaaactatttacaaagtttttaaatatgctataataatctcgtaaacaaatttgtgaaacatttaacaaatcaaaaggagtctcaaatgactgaaaaaactaaagcagtagaaactacagatgttgctcttgcaattgatacattggttcaaaatggtttaaaagcacttgatgagatgcgtcaacttaatcaagaacaagttgattatattgtagctaaagcttctgttgcagccttggatgcccatggagaacttgctcttcatgcagtagaagaaactggtcgtggtgtctttgaagataaagcgacaaaaaatttatttgcatgtgaacacgtcgttaacaacatgcgtcatacaaagacagtgggagttattgaagaagacgatgtcacaggcttgacattaattgctgaaccagtgggagttgtctgtggtatcacgccaacaaccaacccaacttcaactgctattttcaagtcattaatctctcttaaaacacgtaatccaattatttttgccttccacccatcagcacaagaatcatcagcacatgcagcacgtattgttcgtgatgctgctattgctgctggagctcctgaaaattgtgtccaatggattgaacaaccatcaattgatgcaactaatgctttgatgaaccatgatggtattgccactatccttgcgacaggtggtaatgcgatggttaaagctgcctactcatgtgggaaacctgcccttggtgtaggtgctgggaatgttccagcttatgttgaaaaatcagctaatatccgacaagccgctcacgatattgttatgtctaaatcatttgataacggtatggtatgtgcatcagaacaggctgttattattgataaagaaatttataaagaatttgttgaagaatttaaatcttatcatacctatttcgttaataagaaagaaaaagctcttcttgaagaattctgttttggtgcaaaagcaaatagcaaaaactgtgctggtgcaaaattaaatccaaatattgttggaaaatcagcagtttggattgctgaacaagctggatttactgttccagaaggaacaaatattcttgccgcagaatgtactgaagttagtgaaaaagaacctttgacacgtgaaaaactatcacctgttattgcagtattgaaagctgaatctacagaagatggtgttgaaaaagctcgtcaaatggttgagtttaatggtctagggcactcagctgctattcatacaaaagatgcagacttagctcgtgaatttggaactagaattcgtgctatccgtgttatttggaattctccttctacttttggtggtattggggatgtttacaatgctttcttgccatcattgactcttggttgtggttcgtatggacgtaactcagttggtgataacgttagtgctataaatctcttgaatatcaaaaaagtaggaagacgtagaaataatatgcaatggtttaaagtcccttcaaaaacatacttcgaacgtgattctattcaatatttgcaaaaatgtcgcgatgttgaacgtgtcatgattgttacagatcacgccatggttgagcttggtttcttggatcgtatcattgaacaacttgatcttcgtcgcaataaagttgtttatcagatttttgctgaagtagaaccagatccagacattacaacagtaatgaaaggaacagatttgatgcgtaccttcaaaccagacactattattgcattaggtggtggttctcctatggatgctgcgaaagttatgtggctcttctatgaacaaccagaagttgatttccatgacctcgttcaaaaattcatggatatccgtaaacgtgcgttcaaattcccagaacttggtaagaaaacaaaatttgttgctattccaacaacttctggaacaggttctgaagtgacaccatttgccgttatctctgacaaagcaaataatcgtaaatatccaatcgctgattattcattaacaccaactgtagctatcgttgatccggcccttgttatgactgttcctggttttattgcggctgatacgggtatggatgtattgacacatgcaacagaggcttatgtttcacagatggcaaatgattatacagacggacttgctcttcaagcaattaaaattgtgtttgactacttagaacgctcagtaaaagatgctgattttgaagcacgtgaaaagatgcacaatgcgtcaactatggcaggtatggctttcgccaatgcattcttaggtatttctcactcaatggcgcataaaattggcgcacaattccataccgtacacggacgtacaaatgcaattcttttgccgtatgttatccgctataatggaactcgtccagctaaaacagcaacatggcctaagtacaattactatcgtgctgacgaaaagtatcaagatatcgctaaattactcggcttaccagcagcaacaccagaagaagctgtcgaatcatatgcaaaagctgtgtatgaccttggaacacgtttaggtattaagatgaatttccgcgaccaaggcattgatgaaaaagaatggaaagaaaaatctcgtgaactagctttcttagcatatgaagatcaatgttcaccagcaaatccacgccttccgatggtagatcacatgcaagaaatcatcgaagatgcttattatggttatgaggaacgtccaggacgtcgtaagtaacagcagtcgaagaatctcactctattgagtgggatttttagtttcaaaaagattaaccggttaagaatattttcaaaaaattttctgaaaatcacttgacatagtttgtgaagaataatacaatataaaatgtaaacgattacaaaataagatatatttatttctaggaggttttatcatgaaagcggttgttgttaatcaagctagtacaggtgttgaagttgttgagcatgatcttccaaaagttggtcatggtgaagcacttgtaaaagtagaatactgtggtgtatgccatactgatttacacgttgcacatggagatttcggccaggtaccaggacgcattttgggtcacgaaggcattggtatagtagaagaaattggagaaggcgtaacgtctttgagggttggtgatcgtgtctctattgcatggttctttgaagggtgcggtcattgcgaatactgtactacaggacgtgagacactttgtcgtagtgttaaaaatgctggatacagtgttgatggtggtatgagtgaatacgctattgttaccgcggactatgcggttaaggttcctgagggattagacccagctcaagcatcatcaatcacttgtgctggagtaacaacatacaaggctatcaaagaagctggagctgctcctggtcagtggattgcagtgtatggtgcaggtggtcttggaaacttagcagtccaatatgcaaaaaaagtattcaatgctcatgttgtagctgttgatattaacgcagataaacttcaattagctaaagaggttggagcagatttgacagttaatggcaaagaaataaaagatgttgcggcatatattcaagaaaagacaggcggttgtcatggagtggttgtgactgctgtttctaaagttgcgtttaatcaggcgattgacagcgttcgtgctggaggtacagtggtagctgtcggtcttccatcagaatatatggaattgagtattgtaaaaacagtacttgatgggattcgtgtggttggttccttagttggaactcgtaaagacttagaagaagccttcgcatttggagcagaaggcttggtagtaccggtggttgaaaaagtgcctgtggatacagctcctcaagtattcgatgaaatggaaagaggattgattcaaggacgtaaagttcttgactttacaaagtgataatgatgttacgaaccccctttattttaataaagggggttaattatataacgaacaatggacatgttattaaattgtgttacaataactaaaagatatttatataaagagggattcttatggcaatagtatatcaatcaacacgtgatgctagtaataaagtgacagctagtcaagcgattctaaagggattagctgacgatggaggactctttacccccatcacatttccaaaagttgatttagatttcactaaacttaaggatgcttcctaccaagaagtggctaaactcgttttgtcagctttttttgatgattttactgaacaagaattggattactgtattagtcaagcttatgatactaaatttgatacaactgaaatagccccgatagtaaagattggagaccggtatcaccttgaattatttcacggtcctacaattgcatttaaagatatggctttatccattcttccttatttgctaacaacagcagccaaaaaacaaggggttgataataaaatcgttattttaacagcaacatcaggtgacactggcaaggcagcgatggcaggttttgcagatgttccaggaactgagattattgtcttttatcctaaaaatggtgttagttatatccaagaattgcagatgataacacaagccggacaaaatactcatgttgttgcgattgaaggaaattttgatgatgcacagacttcagttaaagaaatgttcaataattcccttcttcgattaaaattatcacagcagcatatgcagttatcatcagccaattcaatgaacatcggtcgccttgttcctcaaattgtttactatatatatgcatatgctcaattagttaagtcaaaggaaatctcaattggtcaaccaattaattttagtgtacctacaggaaattttggtaatattttagcagcatattatgctagtcaaattggattacctgttaccaaactcatttgtgcctcaaatgataataacgttctaacagatttttttaagacacaaacctacgataaaaatcgagaatttaaagtgacatcaagtccctctatggatattttggtctcctctaatctagaacgattaatctttcaccttttaggcgatgatgcagaaacgactaaaaaattaatggaagatttagtgactactggggagtatgccttagaggctaggcaagcaaatattttagagagctttgtagcgggatttgcgacagaacaatttgttgaattagacatcaaacatttatttgaccagtatcagtatatagaggatccgcatacagctgtagcatcagctgtttatcaagcttatcagacagaaactaaagatcaaactccagcagtaattgtgtcaacagcaagtccttataagttcccgtgtgttgttacaaaggctattacaaataaagaagagatacaggatttcgctgctatttcaatcttaaacgatttgtcaggtgtttctttacctaaggcggttacagatctacaaaaggccgaagtaatccatagaacggtagtacctacctcaaatatgcgagaaacggttgaagagtgtctaggtttgaaacaataataaaaatacgattgttttaaaatatttagagcgagaaagaaacattttagaaattttcccatcactctctttttaatgatcctgggtaatagaaaggagatactgtgcgttatagtaaagagattattcagttagctataccagctatgattgaaaatatcttacaaatgctcatgggagtagttgataattatctagtggctcagttaggtgttgtagcagtatcaggtgtttcagttgctaataatataattactatttatcaagctatttttatagctttaggggcgagtatagcaagtctattggccaagtcgttagcaggtagtaagaaggatgatgcaatttcagtatgttctcaagccatttttctaacattactgataggggcagtattaggaattatctcgattgtttttggacaaactttctttaaacttttagggacaacaaaaagtgtcgcacaagttggtggtttatatttagcaattgtgggtggaggtgttgttactttaggaatgttaaccaccctaggctcatttttacgtgtgcaagggcaacctcgtttaccaatgtatgtcagtatttttgtcaatttcctcaatgcagtcttatcaggttttgctatttttgagtggcgctatggtttggtcggagtggcagtatcaactcttatcgcaagattaattggtatttgtatccttgcgaagtatcttcctattaaaaagataataaaaagaatgacttggaaaatcagtgcacaaatttggaatcttgccttaccatcagcaggagaacgtctgatgatgcgagctggagatgttgttatagttgctattgttgttcagttaggtacaaatgttgtagcgggaaatgctattggagaaaccttgacacaatttaattatatgccaggacttggcatcgcaactgctacaattatcctaactgcaaaatatgtaggacaaaaaaacagagaatctatagaagaaactattcaaagttcgtattatattggcttagttctaatgatccttatatcaagttttatgcttcttgcaggcaaaccattgacacagttatttacaaataatccttctgccattaaaggaagtttgattgttattttgctatctttcgtaggagtacctgctactattgggaccttggtttatacagcagcttggcaaggattaggaaatgctaaactcccattttacacaacgactataggcatgtggttaatcagagtagttcttggttatttattaggaatagtttttgaattaggtttgcttggggtttggatggctacgatagcagacaatatctttaggtggctgtttttgaaagttcactatcatcgatatattcaaaaaatgtaaccagaaatggttgcatttttttcgaaaataataaaataatgcttgcgtgtgctgtttttttttgatatcatatactggtgctgtgtatgaacagctttagctatgatgcaagaggttgcgacacgctaggttgcattgccacgcgactcgtgttggttttcttgaggagctagcctattatcgtaaatagacgagaggagaaaagatggcaaacaaaaaaatccgtatccgtttgaaagcgtacgaacaccgtacacttgatacagcggcagaaaaaatcgttgaaactgcaacacgtacaggtgctacagttgctggaccagttccgcttccaactgaacgcagtctttacacaattattcgtgcgactcacaaatataaagattctcgcgaacagtttgaaatgcgtacacacaaacgtttggtagacatcatcaacccaacacaaaaaactgttgatgctttgatgaaacttgatcttccaagtggtgtcaacgtagaaatcaaactttaatttgatttctgagcacaaaaaacgctcgtaaaaaacttttttgagcacaaaaaacgctcataaaaaactttttgaaataaaataagaaaaggaaatattttctcatgacaaaaggaatcttagggaaaaaagtgggaatgactcaaatcttcactgaatcaggcgaattcatccctgttactgtcattgaagcaactccaaacgttgtgcttcaagttaaaactgttgaaacagacggttacgaagcagttcaggttggttttgatgacaaacgtgaagtattgagtaacaaacctgccaaaggccatgttgcaaaagcaaacacagctcctaagcgcttcattcgtgaattcaaaaacattgaaggcttagaagttggtgcagaattatctgtagaacaatttgaagctggtgatgttgttgacgtcacagggacatcaaaaggtaaaggtttccaaggtgttatcaaacgccatggtcaatcacgtggtcctatggctcacggttctcgttaccatcgtcgtccaggttctatgggacctgttgcgcctaaccgcgttttcaaaaacaaacgcttggcaggacgtatgggtggtaaccgtgtaacagttcaaaaccttgaaattgtacaagttatcccagagaaaaacgttgtcctcatcaaaggtaacgtaccaggtgctaagaaatctcttatcactatcaaatcagcagttaaagctgctaaataataagaaaggagaaaacagttaaaatggcaaacgttaaactatttgaccaaactggtaaagaagttagctcagttgagcttaacgaagctatcttcggtattgaaccaaacgaatcagttgtttttgatgttgtaatcagccaacgcgctagccttcgccaaggaactcacgcggttaaaaaccgttcagcagtatctggtggtggacgtaaaccatggcgtcaaaaaggaactggacgcgctcgtcaaggttctatccgctcaccacaatggcgtggtggtggtgttgtctttggaccaactccacgttcatacggctacaaacttccacaaaaagttcgtcgccttgcgttgaaatcagtttattcagcaaaagttgctgaagataaatttgtagctgtagaaaacctttcatttgcagctccaaaaactgctgaatttgcgtcagttctttcagcacttagcattgattcaaaagtacttgtaatccttgaagaaggtaacgaatttgctgcactttcagcgcgtaaccttccaaacgttacagttgctactgcaactactgcaagtgttcttgatatcgttaacgcagacaaacttcttgttactaaagaagcaatctctacaatcgagggggttcttgcataatgaatttgtatgacgtaatcaaaaaacctgttatcactgagaaatcaatggttgctcttgaagcagggaaatatacatttgaagttgacacacgtgcacacaaacttttgatcaaacaagctgttgaagctgcatttgacggagtaaaagttgcaagtgtaaacactgtgacagttaaacccaaagcaaaacgtgttggtcgttacacaggtttcacttcaaaaactaaaaaagctattatcactcttacagctgattcaaaagcaatcgagttgtttgctgctgaagctgaataatctaaggaggaaataacgtgggtattaaagtttataaaccaacgacaaatggccgtcgtaatatgacttctttggattttgcagaaatcactacaaacactcctgagaaatcattgcttgtttcactaaagaataaagcaggacgtaacaacaacggacgtattactgttcgtcaccaaggtggtggacacaaacgtcattaccgtttgattgacttcaaacgtaataaagatggtgttgaagcagttgttaaaacaattgaatacgatccaaatcgtactgcaaatattgctcttgtacactatactgatggtgttaaagcttacatccttgcgcctaaaggccttgaagtaggtcaacgcattatttctggtccagaagcagacatcaaagttggtaacgcacttccgcttgctaacattccagtcggtacagttatccataatattgaattgcaaccaggtaaaggtgctgaattgattcgtgccgctggtgcttctgctcaagtacttggtcaagaaggtaaatatgttcttgttcgccttcaatcaggtgaagtacgtatgatccttggtacttgccgtgcaacaattggtactgttggtaatgaacagcaatcacttgttaacattggtaaagcaggacgtaatcgttggaaaggtgttcgccctacagttcgtggttctgtaatgaaccctaacgatcacccacacggtggtggtgaaggtaaagcaccagttggtcgtaaagcaccatctactccatggggtaaacctgcgcttggacttaaaactcgtaataagaaagctaaatcagacaaacttattgttcgtcgtcgtaaccaaaaataataggttaatagcataatcttatacaaatccgccagctcggtagtacactatagtgtacaggccgttgtggtacattatttaaaggagaaaactacaaaatgggacgtagtcttaaaaaaggacctttcgtcgacgagcatttaatgaaaaaagttgaagctcaagcaaatgacgaaaagaaaaaagtaatcaaaacttggtcacgtcgttcaacgattttcccaagtttcatcggatacacaatcgcagtttatgatggacgtaaacatgttcctgtttatatccaagaggacatggtaggtcacaaacttggtgaatttgcaccaacacgtacttacaaaggtcacgcagctgacgacaagaaaacacgtcgttaataggaggaggacacaatggcagaaattacttcagctaaagcaatggctcgtacagtgcgtgtttcacctcgtaaaacacgtttagtacttgatcttatccgtggtaagaatgttgctgacgcaatcgcaatcttaaaattcactccaaacaaagcagctcgtgttattgagaaaactcttaactcagcaattgcaaatgcagaaaacaactttggtttggaaaaagcaaacttggtagtatctgaaacattcgctaacgaaggaccaacaatgaaacgtttccgtccacgtgcgaaaggttcagcttcaccaatcaacaaacgtacaactcacgtaactgtagttgtatcagaaaaataaggaggtaaaatcgtgggtcaaaaagtacatccaattggtatgcgtgtcggaatcatccgtgactgggatgcgaaatggtatgctgaaaaagaatacgcggattaccttcatgaagatcttgcaatccgtaaattcattaataaagaattagctgacgcatcagtttcaactattgaaattgaacgtgcagtaaacaaagttattgtttcacttcacactgctaaaccaggtatggttatcggtaaaggtggagcaaacgttgacgctcttcgtggtcaacttaacaaattaactggaaaacaagtacacatcaacatcattgaaatcaaacaacctgatttagatgctcaccttgttggtgaaaatattgctcgtcaattagagcaacgtgttgctttccgtcgtgctcaaaaacaagcaatccaacgtacaatgcgtgcaggagctaaaggtattaaaactcaagtttctggtcgtttgaacggtgctgatatcgctcgtgctgaaggttattcagaaggaactgttccgcttcacacgcttcgtgctgatatcgactatgcttgggaagaagctgacacaacttatggtaaacttggcgttaaagtttggatttaccgtggagaagttcttccagctcgtaaaaacactaaaggaggcaaataacaaatgttagtacctaaacgtgttaaacaccgtcgcgaattccgtggaaaaatgcgcggtgaggctaaaggtggtaaagaagtttcattcggtgaatacggacttcaagctacaactagccactggattacaaaccgtcaaatcgaagctgcccgtattgcgatgactcgttacatgaaacgtggtggtaaagtttggattaaaatcttcccacacaaatcatacactgcaaaagctatcggtgtacgtatgggttctggtaaaggggcacctgaaggttgggtagcaccagttaaacgtggtaaagtgatgtttgaaattgctggtgtttctgaagaagttgcacgtgaagcattacgtcttgctagccacaaattaccagttaaatgcaaattcgtaaaacgtgaagcagaataaggagaagacatgaaacttcaagaaattaaagattttgttaaagagcttcgtggattgtctcaagaagaacttgctaagaaagaaaacgaactcaaaaaagaattgtttgatcttcgtttccaagctgcagcaggtcaacttgaaaagactgctcgccttgacgaagttaagaaacaaattgcacgtgttaaaactgtgcaatcagaaatgaaataatagattgggaaaggagaaattctaaatggaacgtaatcaacgtaaaactctttacggacgcgtagtgtctgacaagatggacaaaacaatcacagttgtagttgaaactaaacgtaaccacccagtctatggtaaacgtatcaactattctaaaaaatataaagcacatgatgaaaacaacgttgctaaagaaggcgatatcgttcgtatcatggaaactcgcccactttcagctacaaaacgtttccgtcttgtggaagtagtggaaaaagctgttattatctaatcaaactaaaaggagaaaattgaaatgattcaacaagaaactcgcttgaaagttgctgataatagcggtgctcgtgagatcttgactatcaaagtacttggtggttcaggacgtaaattcgctaacatcggtgacgtaatcgttgcttctgtaaaacaagctactcctggtggagcagttaaaaaaggtgatgtggttaaagctgttatcgttcgtacaaaaactggtgcacgccgcccagacggttcatacatcaaatttgacgacaatgctgctgtaatcatccgtgacgataaaactcctcgcggaactcgtatctttggcccagttgcacgtgaattgcgtgaaggtggctacatgaagatcgtttcattggcaccagaagtactttaatctcagattaacaaacgtagtcccctaggatttcctagggtgcctttcgaggcgtaagaaaaataggagaaaaactcaaatgtttgtaaaaaaaggcgacaaagttcgcgttattgctggtaaggacaaaggcactgaagctgtagttcttaaagctcttccaaaagtaaacaaagttgttgttgaaggcgtagccctcatcaagaaacatcaaaaaccaaataacgaaaaccctcaaggcgctatcgttgaaaaagaagctccaatccatgtgtcaaacgttcaagttcttgataaaaatggtgtagcaggacgtgttggttacaaagttgttgacggcaaaaaagttcgttacaacaaaaaatcaggcgaagtgcttgattaatcacgaaggaaaggagaagcataatggcaaatcgcttaaaagaaaaatatactaatgaagttgttcctgcgttgacagaaaaatttaactattcatctgttatggctgtgccaaaagttgagaaaatcgttcttaacatgggtgttggtgatgctgtatcaaacgctaaaaatcttgagaaagctgctgctgagttagcacttatttcaggtcaaaaaccacttattactaaagctaagaaatcaatcgctggcttccgtcttcgtgaaggtgtagcgatcggtgcaaaagttaccctgcgcggtgaacgtatgtacgaattcttggataaattagtttctgtttcacttccacgtgtacgtgacttccatggtgttccaacgaaatcatttgatggacgtggaaactacactcttggagttaaagaacaattgatcttcccagaaatcaactttgatgacgttgataaagtacgtggtcttgatatcgttatcgttactactgctaacactgatgaagagtcacgtgaattgctaaaaggccttggaatgccttttgcaaagtaatctaggaggtaaataaattggctaaaaaatctatgattgctaagaacaaacgcccagcgaagttctctacgcaagcttacactcgttgtgaaaaatgcggacgtccacactcagtttaccgcaaattccaactttgccgtgtttgcttccgtgacttggcttataaaggtcaagtaccaggcgtaactaaagcatcttggtaataaattaatgatgctttgtgtttaaaaggtgtcgttgataatggcactgatttttaaacgcaaatatactaagacctagtcttacaacgtccgtaaggactcattaattagcaagtgattcaattcaaactgctaataagaggagaattaaaaaatggttatgactgacccaattgcagactttttaactcgtattcgtaatgctaaccaagcaaaacatgaagtgttagaagtacctgcatcaaacattaaaaaagggattgctgatatccttaaacgtgaaggttttgtaaaaaacgttgaagttattgaagatgacaaacaaggcatcatccgtgtgttccttaaatatggacaaaatggtgaacgtgttatcactaacttgaaacgtatttcaaaaccaggtcttcgtgtttatactaaacatgaagatatgcctaaagttcttaacggacttggtattgcaattgtatcaacttctgaaggtcttttgactgacaaagaagctcgccaaaaaaatattggtggagaagtacttgcatatatttggtaaaattttacctaaaatgctcattgagtcacagtataatcctgtgttctcatgagtccccgtgaaaactagttgctcaagcagcttgacaatttaacaggagaaaataaacatgtcacgtattggtaataaagtaattacattgcctgcaggtgttgaaatcattaacaaggataatgttgttactgtaaaaggacctaaaggccaactcactcgtgagtttaataaaaatattggaatcactgttgaagggactgaagtaacagttactcgtcctaacgactcaaaagaaatgaaaacaattcatggtacaactcgtgcgaacttgaacaacatggttgttggtgtttctgaaggtttcaaaaaagctcttgaaatgcgcggtgttggttaccgtgcacaacttcaaggatcaaaacttgttctttctgttggtaagtctcaccaagacgaagttgaagctccagaaggtgttacttttgaagtgccaactccaacaacaatcaacgtaatcggtatcaacaaagaaagcgttggacaaactgctgcttacgttcgtagcttacgttcaccagaaccatataaaggtaaaggtattcgttacgttggtgaattcgtacgccgtaaagaaggtaaaacaggtaaataataggattgatagattttgtagaatcttttctgcaaattctctatcttttcattttaatattgtcattttgacataacaatatatttaagaggtgaaaattgtgatttcgaaaccagataaaaataaaatccgccaaaaacgccaccgtcgtgttcgcggtaaactctctggaactgctgatcgcccacgtttgaacattttccgttctaatacaggcatctacgctcaagtaattgatgacgtagcgggtgtaacgctcgcaagtgcatcaactcttgataaagaagtttctaacggaacaaaaacagaacaagccgttgttgtcggtaaacttgttgctgaacgcgcagtagctaaaggtatttctgaagtggtgtttgaccgcggtggatatctctatcacggacgtgtaaaagctttggctgactcagctcgtgaaaacggattgaaattctaatagggaggacacttaataatggcatttaaagataatgcagtagaacttgaagagcgcgttgttgcgattaaccgcgttacaaaagttgttaaaggtggacgtcgtctacgttttgcagctcttgtagttgttggtgaccgtaatggtcgtgttggttttggtacaggtaaagctcaagaagtaccagaagctattcgcaaagctgttgaagctgctaagaaaaacatggttgaagttcctatggtcggtacaacaattcctcacgaagttcgttcagaatttggtggagcgaaagtattgttgaaaccagctgttgagggtgctggggttgccgctgggggtgctgttcgtgccgtcatcgaattagcaggtgttgcagatattacatctaaatcacttggttcaaacactccaatcaacattgttcgcgcaactgttgagggcttgaaacaattaaaacgtgcagaagaagttgctgctttacgtggcatttctgtttctgacttagcataagaaaggggattataatggctcaaattaaaattactttgactaagtctccaatcggtcgcaaaccagaacaacgtaaaacagttgttgcccttggacttggtaaattaaactcttcagttgttaaggaagataatgctgccatccgtggtatggttaacgctatctctcacttagtaactgttgaagaagcttaattaaatgctaaatcgcactgattgttattggtgcgatttaaacaaatcgtataggcgagtctttgcggggagtaccttttccctcgtaaaggcgttagcattttacaaataaggagaaaaaataatgaaacttcatgaattaaaacctgcagaaggatcacgtaaagtccgcaatcgtgtgggtcgcggtacatcttcaggtaatggtaaaacttctggacgtggtcaaaaaggacaaaaagcgcgtagtggtggtggagtacgccttggttttgaaggtggacaaactccattgttccgtcgtatgccaaaacgtgggttctcaaacatcaatgcaaaagaatatgctcttgtgaaccttgaccaattaaatgtctttgaagatggtactgaagtaactccagttgttcttaaagaagctggaatcgtgcgtgctgaaaaatcaggcgttaaaattcttggtaatggtgaattaactaagaaattgtctgttaaagcagctaaattttctaaatctgctgaagcagctatcactgctaaaggtggttcaatcgaagtcatctaattaatgagaggtaactcattatgtttttaaaattacttagagatgcactcaaagtaaagatggtaagaaataaaattttatttactatctttatccttcttgtatttcgtatcggaacgcatatcacagtaccgggcatcaatgttaagagtttagaacaaatgggtgaacttccatttctaaatatgcttaacttagttagtggtaatgcaatgagaaacttttcggtattctctatgggagttagcccttacattactgcgtctattgttgttcagttacttcaaatggatattcttccgaagtttgttgaatggggaaaacaaggagaggtaggtcgtcgtaagcttaaccaagctacacgttatatttctttgttccttgcattcgtacaatcaattggtattactgctggttttaacactctatcaagtgttgctttagttaaaactccgaatgtacaaacatatttgcttattggtgcaatccttacaacaggtagtatggtggttacttggctaggtgaacaaattactgataagggattcggaaatggagtgtctatgattatctttgcgggtatcatttcttccattccaagtgcaattacaactatctacgaagatttctttgtaaatgtacgctcttcagcaattacaaattcttacatctttgtcgggatccttatcgtagcagtattagcaattgtattttttacaacatttattcaacaagctgaatacaaaattccaatccaatatacaaaacttgttcaaggagctcctacaagttcatatcttcctctaaaagtaaatccagctggtgttattcccgttatctttgctagctcgattacaacaattccaagtacgattattcctttctttcaaaatggcaaagaaattccttggcttactaaactccaagaattacttaattatcaaaccccagtcggtatgattatctatgctatcttgattattctgttctctttcttctatacttttgtacaagtaaaccctgaaaagacagcagagaatcttcaaaaaaattcgtcctacattccaagtattcgaccaggacgagaaacagaagaatatatgtcatcgctattgaaaaaattagcaacaattggttcagtatttctagcatttatttccttgttaccaattattgctcaacaagcgttgcatttgtcatcaagtattgcgttaggtgggacaagcttactcattttgattgcaacgggtattgaaggtatgaaacaactcgagggctatcttttgaagagacgctatgttggattcatgaatacaacagaatagaatataggttgactctgtcaaccttctattttgttttttaataagtccgacatgctgtgttggatttatttaaaaacaaaataaggagactataatgaatcttttaattatgggtttgcctggtgctggtaaaggtactcaagcagctaagatcgttgaagaatttggtgttgctcacatctcaacaggggatatgttccgcgccgcaatggctaatcaaaccgaaatgggacgtttagctaaaagttatattgataaaggtgaattggttcctgatgaagtaacaaacgggattgtaaaagagcgcttagctgaggatgatatcgcagaaaaaggttttttacttgatggatatccacgtactattgaacaagcacacgccttagatgctacgcttgaagaactaggactacgcttagatggtgttattaatattaaagtggatccatcatgtcttatagagcgtttgagtggtcgtattatcaatcgtaaaactggtgaaactttccacaaagtgttcaacccaccagtagattataaagaagaagattactatcaacgtgaagatgataagcctgaaactgtcaaacgtcgcttggacgttaatattgctcaaggagaacctattcttgaacactatcgtaagcttggtcttgttacagatattgaaggtaatcaagaaataacagaagtttttgcagatgttgaaaaagcgttgctagaactcaaataaattatgctaatctacttgcataagtagattagtaatgatatactaagttagtctgacttataattgttacctctttatagaggacatcaaatcgaaatttagggggtacttttgcgtggcaaaagaagatgtgattgaaattgaaggtaaagttgttgaaactatgcctaacgcaatgtttactgttgagttggaaaatggacaccaaattttggcaactgtatcaggaaaaatccgtaaaaactacatccgtattttggtaggtgatcgtgttactgttgaaatgagcccatacgatttaacacgtggacgcatcacataccgctttaaatagtcgaaataattggagggattaaaacatgaaggtaagaccatcggttaaaccaatttgcgaatactgtaaagttattcgtcgtaacggtcgtgttatggtaatttgtccgacaaacccaaaacacaaacaacgtcaaggataatatagaaaggagataaaatggctcgtattgctggagttgatattccaaatgacaaacgtgtagtaatttcacttacttatgtatacggaattggtctttctacatctaaaaaaatcttagcagctgcaggtatttctgaagatatccgcgttaaagatttgacaccagatcaagaggacgctatccgtcgtgaagttgatgcaatcaaagttgaaggtgacctacgtcgtgaggtaaacttgaatattaaacgtttgatggaaatcggttcataccgtggaatccgtcaccgtcgtggacttcctgtccgtggacaaaatactaaaaataacgctcgcactcgtaaaggtaaagctgttgcgattgcaggtaagaaaaaataaaataggaggtaaaacaattggctaaaccaacacgcaaacgtcgtgtgaaaaagaacatcgaatctggtgttgctcatattcacgctacattcaataacactattgttatgattacagatgtgcatggtaacgctcttgcatggtcatcagctggtgctcttggatttaaaggttctcgtaaatctactccatttgctgctcaaatggctgctgaagctgctgctaaatctgcacaagaacacggtcttaaaactgttgaagttactgtaaaaggtcctggttcaggtcgtgaatctgctatccgtgcccttgctgcagctggtcttgaagtaactgcaattcgtgatgtgactcctgtaccacataatggtgctcgtcctccaaaacgtcgtcgtgtataatcatagcattttatagtacacaacttttcgtttaagagggagtaactaaatgattgagtttgaaaaaccaataataacaaaaattgatgaaaataaagattacggcagatttgtcatcgaaccactagaacgtggctacggtacaactctaggaaactctcttcgtcgtgtgcttctgtcttcacttccaggtgcagcagtcacatcaatcaaaattgatggagtattacacgaatttgatactatcccaggtgtacgtgaagatgtgatgcaaatcatccttaatgtaaaaggacttgctgtgaaatcttacgtcgaagacgaaaagattatcgaactagacgttgaaggtcctgcagaaattactgccggagatattttaacagatagtgatatcgaaattgtaaaccctgaccattatcttttcacaattgctgaaggtcacagtttgaaagcaacaatgacagttgctaaaaaccgaggttatgttccagcagaaggaaataaaaaagatgatgcaccagtgggaacattggctgtagattcaatctatacaccagtgaaaaaagttaattatcaagttgaacctgctcgtgtaggtagtaacgatggctttgataaattaactattgaaatcatgacaaatggcacaatcattcctgaggatgctcttggtctttcagctcgcgtcttaattgaacacttaaacttgtttactgatttaacagaggttgctaaagcaactgaagtaatgaaggaaacagagaaagtgaacgatgagaaagtgcttgaccggacaattgaggaacttgatttgtcagtgcgctcatataactgtttaaaacgtgctggaattaatacagtatttgatttaacagaaaaaactgagcctgaaatgatgaaagtccgaaacttaggacgtaagagtcttgaagaagttaaaatcaaacttgccgatctaggtcttggattaaaaaacgataaataaaataggaggacataatggcttaccgtaaactaggacgcactagctcacaacgtaaggcaatgcttcgtgatttgacaaccgatcttcttatcaacgaatcaattgtaactactgaagcacgtgctaaagaaatccgtaaaacagttgaaaaaatgattactctaggtaaacgtggtgatttacatgctcgtcgtcaagctgctgcttatgtacgtaatgaaattgcatcagaaaactatgatgaagcttctgataaatatacatcaacaacagctcttcaaaaactttttgacgacatcgcacctcgttatgctgaacgtaacggaggatacactcgtattcttaaaacagaaccacgccgtggcgatgctgccccaatggcaattattgaattagtataatttttatcaattttgttgagtgttatgatgatggaatcaatcgattcttagtctagctctggtctaccgctgagaattattctcagcgggaacactcatcatatattgttaaataggtaacgcttgtttacgaaatgcaaacaattttgtttatatttcgtaagcaggcgttttatgcattattatatttattggatattttcgatgagcaaagaatttaatcgctagactacatttctcaatagtggttatataatttctcttaattgaatatagaggaatagttatgtctatactaaatttataaaatacaaaaatagtattgacaggaagtagaaatatttagtataatgaataagttgtctcgagagagcagtttctattagcgcgtagttaacaacttaaaaaaagtagttgacaaagcagaataagtttgctagaatatagaagttgtctcaagagaggcaaagacctttgaaaactgaacaagacgaacgaatgtgcagggtggatttacattgtaaatccgtcaatgacaaaaaacaataaatctgtcagcgagacagaaaagagcaaagctcaaacttttaatgagagtttgatcctggctcaggacgaacgctggcggcgtgcctaatacatgcaagtagaacgctgaggtttggtgtttacactagactgatgagttgcgaacgggtgagtaacgcgtaggtaacctgcctcatagcgggggataactattggaaacgatagctaataccgcataagagtaattaacacatgttagttatttaaaaggagcaattgcttcactgtgagatggacctgcgttgtattagctagttggtgaggtaaaggctcaccaaggcgacgatacatagccgacctgagagggtgatcggccacactgggactgagacacggcccagactcctacgggaggcagcagtagggaatcttcggcaatggacggaagtctgaccgagcaacgccgcgtgagtgaagaaggttttcggatcgtaaagctctgttgttagagaagaacgttggtaggagtggaaaatctaccaagtgacggtaactaaccagaaagggacggctaactacgtgccagcagccgcggtaatacgtaggtcccgagcgttgtccggatttattgggcgtaaagcgagcgcaggcggttctttaagtctgaagttaaaggcagtggcttaaccattgtacgctttggaaactggaggacttgagtgcagaaggggagagtggaattccatgtgtagcggtgaaatgcgtagatatatggaggaacaccggtggcgaaagcggctctctggtctgtaactgacgctgaggctcgaaagcgtggggagcaaacaggattagataccctggtagtccacgccgtaaacgatgagtgctaggtgttaggccctttccggggcttagtgccgcagctaacgcattaagcactccgcctggggagtacgaccgcaaggttgaaactcaaaggaattgacgggggcccgcacaagcggtggagcatgtggtttaattcgaagcaacgcgaagaaccttaccaggtcttgacatccttctgaccggcctagagataggctttctcttcggagcagaagtgacaggtggtgcatggttgtcgtcagctcgtgtcgtgagatgttgggttaagtcccgcaacgagcgcaacccctattgttagttgccatcattaagttgggcactctagcgagactgccggtaataaaccggaggaaggtggggatgacgtcaaatcatcatgccccttatgacctgggctacacacgtgctacaatggttggtacaacgagtcgcaagccggtgacggcaagctaatctcttaaagccaatctcagttcggattgtaggctgcaactcgcctacatgaagtcggaatcgctagtaatcgcggatcagcacgccgcggtgaatacgttcccgggccttgtacacaccgcccgtcacaccacgagagtttgtaacacccgaagtcggtgaggtaaccttttaggagccagccgcctaaggtgggatagatgattggggtgaagtcgtaacaaggtagccgtatcggaaggtgcggctggatcacctcctttctaaggataaggaaacctgccatttgcgtcttgtttagttttgagaggtcttgtggggccttagctcagctgggagagcgcctgctttgcacgcaggaggtcagcggttcgatcccgctaggctccattgaatcgaaaggttcaaattgttcattgaaaattgaatatctatatcaaattccacgatctagaaatagattgtagaaagtaacaagaaaataaaccgaaaacgctgtgaatatttaatgagttttctagttttaaagaaactaggttaataaggttaagttaataagggcgcacggtggatgccttggcactagaagccgaagaaggacgtgactaacgacgaaatgctttggggagctgtaagtaagcgctgatccagagatgtccgaatgggggaacccactagttaatgactagtatccatatctgttaaggatatgagaaggaagacgcagtgaactgaaacatctaagtagctgcaggaagagaaagcaaaagcgattgccttagtagcggcgagcgaaacggcaggagggcaaaccgaagtgtttacacttcggggttgtaggactgcgatataggattaatcattatagaagaattacctgggaaggtaagccaaagagagtaacagcctcgtatttaaaatgatagattaaccttagcagtatcctgagtacggcgagacacgcgaaatctcgtcggaatctgggaggaccatctcccaaccctaaatactctctagtgaccgatagtgaaccagtaccgtgagggaaaggtgaaaagcaccccgggaggggagtgaaatagaacctgaaaccgtgtgcctacaacaagttcgagcccgttaatgggtgagagcgtgccttttgtagaatgaaccggcgagttacgatatgatgcgaggttaagttgaagagacggagccgtagggaaaccgagtcttaatagggcgtcatagtatcatgttgtagacccgaaaccatgtgacctacccatgagcaggttgaaggtgaggtaaaactcactggaggaccgaaccagggcacgttgaaaagtgcttggatgacttgtgggtagcggagaaattccaaacgaacttggagatagctggttctctccgaaatagctttagggctagcgtcgatgttaagtctcttggaggtagagcactgtttgggtgaggggtccatcccggattaccaatctcagataaactccgaatgccaacgagatataatcggcagtcagactgcgagtgctaagatccgtagtcgaaagggaaacagcccagaccaccagctaaggtcccaaaatatatgttaagtggaaaaggatgtggggttgcacagacaactaggatgttagcttagaagcagctattcattcaaagagtgcgtaatagctcactagtcgagtgaccctgcgccgaaaatgtaccggggctaaaacatattaccgaagctgtggatgacacaaaagtgtcatggtaggagagcgttctatgtgtgaagaaggtgtaccgtgaggagcgctggaacgcatagaagtgagaatgccggtatgagtagcgcaagacaggtgagaatcctgtccaccgtaagactaaggtttccaggggaaggctcgtccgccctgggttagtcgggacctaaggagagaccgaaaggtgtatccgatggacaacaggttgatattcctgtactagagtatatagtgatggagggacgcagtaggctaactaaaccagacgattggaagtgtctggtcaaacagtgaggtgtgatatgagtcaaatgcttatatctttaacattgagctgtgacgaggagcgaagtttagtagcgaagttagtgatgtcacactgccaagaaaagcttctagcgatacatatactctacccgtaccgcaaaccgacacaggtagtcgaggcgagtagcctcaggtgagcgagagaactctcgttaaggaactcggcaaaatggccccgtaacttcgggagaaggggcgctgattttagatcagccgcagtgaataggcccaagcaactgtttatcaaaaacacagctctctgctaaatcgtaagatgatgtatagggggtgacgcctgcccggtgctggaaggttaagaggagtgcttagcgtaagcgaaggtatgaattgaagccccagtaaacggcggccgtaactataacggtcctaaggtagcgaaattccttgtcgggtaagttccgacccgcacgaaaggcgtaatgatttgggcactgtctcaacgagagactcggtgaaattttagtacctgtgaagatgcaggttacccgcgacaggacggaaagaccccatggagctttactgcagtttgatattgagtatctgtaccacatgtacaggataggtaggagcctatgataacgggacgccagtttcgtttgaggcgttgttgggatactacccttgtgttatggctactctaacccagataggcaatccctatcggagacagtgtctgacgggcagtttgactggggcggtcgcctcctaaaaggtaacggaggcgcccaaaggttccctcagactggttggaaatcagtcgtagagtgtaaaggtataagggagcttgactgcgagagctacaactcgagcagggacgaaagtcgggcttagtgatccggtggttccgtatggaagggccatcgctcaacggataaaagctaccctggggataacaggcttatctcccccaagagttcacatcgacggggaggtttggcacctcgatgtcggctcgtcgcatcctggggctgtagtcggtcccaagggttgggctgttcgcccattaaagcggcacgcgagctgggttcagaacgtcgtgagacagttcggtccctatccgtcgcgggcgtaggaaatttgagaggatctgctcctagtacgagaggaccagagtggacttaccgctggtgtaccagttgtcttgccaaaggcatcgctgggtagctatgtagggaagggataagcgctgaaagcatctaagtgcgaagcccacctcaagatgagatttcccatgattttatatcagtaagagccctgagagatgatcaggtagataggttaggagtgtaattgtggtgacacatttagcggactaatactaatagctcgaggacttatccaaaaagagatattgacaacgttacggtttcttgttagactatagatattcaattttgagtgaataaggctcaatagttaagtgataattgcctaggagatacacctgttctcatgccgaacacagaagttaagccctagaacgccggaagtagttgggggttgccccctgtgagataaggtagtcgcttagcaaagggagtttagctcagctgggagagcatctgccttacaagcagagggtcagcggttcgatcccgttaactcccataggtcccgtagtgtagcggttatcacgtcgccctgtcacggcgaagatcgcgggttcgattcccgtcgggaccgtagactcgttagctcagttggtagagcaattgacttttaatcaatgggtcactggttcgagcccagtacgggtcatttagaaatgcgggtgtggcggaattggcagacgcaccagatttaggatctggcgcttaacggcgtgggggttcaagtcccttcacccgcattagtagattgccggcttagctcagttggtagagcatctgatttgtaatcagagggtcgcgtgttcaagtcatgtagccggcattaactttataattttagaagttattttgggcgcgtagctcaggtggttagagcgcacgcctgataagcgtgaggtcggtggttcgagtccactcgtgcccatcaagaatatggtccgttggtcaaggggttaagacaccgccttttcacggcggtaacacgggttcgaatcccgtacggactattttttgttatatggaggattacccaagtccggctgaagggaacggtcttgaaaaccgtcaggcgtgtaaaagcgtgcgtgggttcgaatcccacatcctcctttaaagatatcgcgggatggagcagctaggtagctcgtcgggctcataacccgaaggtcgtaggttcaaatcctgctcccgcaataggctcggtagctcagttggtagagcaatggattgaagctccatgtgtcggcggttcgattccgtctcgcgccatttataccttaggagagatagcgaagaggctaaacgcggcggactgtaaatccgctccttcgggttcgggggttcgaatccctctctctccatagtaaacgggcatagtttaaaggtagaactaaggtctccaaaaccttcagtgtgggttcgattcctactgcccgtgttttttctaatatggcgggtgtggtgaagtggttaacacatcagattgtggctctgacattcgtgggttcgattcccatcactcgccttttcatggggtatagccaagcggtaaggcaagggactttgactccctcatgcgttggttcgaatccagctaccccagttttaagatagccggcgtggcggaattggcagacgcgctggactcaaaatccagtgtcctcacggacgtgccggttcgaccccggccgccggtatatttataaagacaaggtttagaagccttgtcttttttgtattgtgctggtaattttgagaaaaagttactgaaaattacttatatttgtttttcattattgcaatcgttatagaaggtttaaaacaagcagaaataataaggaaatttttcaagagttagtggagactcaacatttaaatgaaattcaaagaggactcctaaatgtcataggttctgaagtaataaaagtgtttgtgaatgatagataggtagtataaaataataagatttttcagtgtatatgttacgactaaaaaattaaactcgtgaaaatttgttatactaatattagttttaacatactggtaaataataattatttttattagatacttgacatgggaagtttattttctaagaaaagagagcatgttgaaaaaatatgtaaaatggttaattcccatatctattattgggatgttactagcaggctgtcaaatgaatagtgaatctaaaagtcagtcaaacgaagtaaaaaatagcaaacagtcagcagtaaagaaaggtaaaaaagtaataaaaaaagaacaagtagcttatctcaaaaagcatgaaaaagaattaactgaatatgtcaaaatccagatattagtgaaattaagtatgattggaatagtgtgcgcatagtggaagctagtagtggaacccctcaaggcggagagcaactattattaattttgggttatgcaaatggcagtgaattaaccaattttactctaaatttcacattgggtgataatcaaatgcctaatattgactcagttggctcagataatttatcaactattgaagattaataataacaataagaaaggtatataatgggatgatggaatcttaaggaatttgaagatatattttgaagtatggcagaaagtgctaatacaggtcgatcgaattcttttgttttagaagaattaactgaatttcaaagagaaaagttaaaaaatggggagtcagttaagtttaatttttctaaagatgttaagaaagaaaataaggttatcgaaggagggcacccccaagtcatagggtaatctacctgcaaactggataagtccttaaatacaattgatgaaaaagtagaggttcgcgttcctgatgtcaatggcggttatcactctgagcattgtgttactaattcctatcagaaaggttactgaaagatgatgaagcagtaactctataatcactaaaagctcatcattgcttagtgtttaagttaacttctaaagctcaaaccttgttaaatcaaggtctgtttgcttttaaaagtgacatgttatttttctaaaaatgagattattgggattcctcattctaagttactttgtttatatgtacctttacttaaggtttattttcattatttttaatttaatattttggagtatgtatgctccattatagtattttcgaagacatctttaaaaggactgtagaagttaaaatattttaacctagtatctaacgtcatatattggtacatagttttaagtatccttttgataaccttgtacatatgaaataggctagatatttttagtgaactaaatgtaagtttattgcttgtattaggcgggataacaatattgttgtttttattctttctgagtaatggtttattaatcatgtaattattctggtatcaaatgatacttttaatattccagtttgtcaataaatcatcaatgtaattcttttcatcaaaagcgatccctttatctagttgatttaatatgttaacttgatgattgttcttcttgcttaatatatgggataataattatcttaaattgacacttggagcattcaatcacgtgatgtaataactaaaaattgtttaaaatttaaggatgtatttcttgttgatcttactatctgatctaataatagtatataataagattaaaatttaaacattgtctggagatgtagcaaaggagataaaatgactaaaatttatcatatgattttatgtaattctgatataatgaagattttagctataataaaatctcttccactgaatgattgttggctgtgtgctggcacattgagaaactttgtatggaataaactttctggaataaatgagacattgacatcagatattgatgttgtattttttgataaaaatatttcttatgaagaaacggtggtattagaacaacaattaaaggataactatccacagtacgattgggaacttaaaaatgaattttacatgaacactcattctcctaataccccaaagtatactagctctaaagatgctatttcaaaatttcctgaaaagtgtactgcagtgggagcaaggttagatgatagaaatcaactcgaactttacctcccttatggtgaagaggaaatattaaatttcattgttagtcctacgccatattttgaagaggatctattacgttataatgtttatttgaagcgagtggataagaagaaatggaataatatttggcctcgtttaacaatcataaaaaaatgataacgttactggagttggcttaacagcttttaaatttttagactgacaaatagtatagacctttaataaggtcgtttatcgataatcatagtgtactgtgttataatcgttatagcataaaaacacgttgcagttggtagtctgcaagcgttcagtgaacgtcagtaaccttccctccaggtcgtccattgcaatttaatatttaaaggagggggctgtatgaaaatgacagtctattttgatggtaatttttggttgggtttgattgagtacgatgatgatggtgattacaaagtttttcggtatttttttggaaaagaacctaaagatgatgatgtttttaattttataaatcataaacttaatgatttgataaaaaaatatgagtttgttaaaacggatatttctctaaagcgtacgaatgaacacaaaaaaagtcctaaaagaatgcaaagagaaattaatagagaaaaacgtaagccagtagtatctacaaaagcgcaattggcgatgaaaactattcatatgagtataaaaaacgaacgtcaattaagtcagaaatgtaagaaaaatgagttaagaaaacatcggtaccaattaaaacaagaaaaacgttaccaaaagaaaaaaggacattgattgtgtcatcatataaaaagcttgagagtgtcatctcaagctttttatatgttaactaatatgagtcactaaatagtctgataatgctcaattaatgtgttttgggaaaaaatcatttccttaaaggacaccattgtcatgttgttatcaccttactttttttatacttagtatatgtttaagaaaggaataagttgttttgagagattttgaggagttgtttgataaagtaaagccaatcgtaatgaagctgagaagaaattattttgttcaactttgggaatatgatgattggattcaagaaggacgtattgtactttttaggttgcttgaagagcatccgtatttattggataatgaaagcaaactattcatttactttaaaacaaaattttcaaattatttaaacgatgtattaagacaccaagattgtcaaaagcgacaatttaataaaatgccttatgaagaaataagtgaagttagtcactatgttaagagtaaaggactagttttagatgactatattgcttatcgtgatactttaacaaaagtggaagaaactttgtcagatattgataaagaaaaatttgaaaaactgattagtggtgaacgttttgcggggaagaaacaattcatacgagatattcaaccctttttcaatgcttttaaagcggattaatcgattttatttctgcagtagatagctgcagaatttttttatagggaaagttcgctgatatattcctgtgaaagcctttgttttttgttataatataataaaatgcttgtgaggtgtcagtatgagtaaagttcgtttatatatcgctcgtcatggtaaaacaatgtttaatacaattggtcgcgctcaggggtggagtgatactcctttaactacttttggagaactcgggattaaagagcttggtttgggactaaaggcttcaaatattagttttaaagaggctttttctagtgatagtggacgtactttacaaactatggaaattattctcagggaagtgcaacaagaaaatattccctatacgagagataaacgaatccgcgagtggtgctttggtagtttggatggaggatatgatggcgacctttttaatggcgttctgcctcgagtttcaaacggagatatgagccatttgacacacgaagaaattgctaatttgatttgtcaagttgatacggctggctgggcagaaccgtgggcaatattgagtaaccgtattctgtcaggcttcactgctatagctaaaaaaatagaggatattgggggaggtaatgcgattgttgtcagtcatgggatgactattgcgacttttttatggttaatcgaccatagtacccctcgtagtttaggcttagataatggtagtgtctcagtcgttgattttgaagatggaacattttctattcaatctattggggatatgtcctatcgagaaaaaggaagagaaattttagaaaaaacattgcaatgaaaaaaaataaaattatccgattcagtttagttggtgttctacttgcgatactatgctttagtctttttgctttattgaagcctaacagtcaacaatcatcatctcaaaagttgaggaatgaggatataaaaaagatatcctctcaaaaaagaaataagaaattacaattaccagctgtatcatcaaaagattggaacttgattttggtcaatcgtgaccataaacatgaagaattaagtccagatgtggttcctgttgaaaatatttatttggataaacgtattacgaagcaagctactcagtttttagaggctgctagagcaattgattcacgagaacatttaatttcgggttatcgtagtgttgcctatcaggagaagttgttcaattcttatgttactcaagagatgactagtaaccctaatttgacgaggggacaagcagaaaagttggtaaaaacttactctcagcctgcaggtgctagtgaacaccagactggattagcgatggatatgagtactgtagattctttgaatgagagcgatcctagagtagtcagtcagttgaaaaagatagctccacaatatggttttgtcttacggtttccggatggtaaaacagcagaaacaggggtaggttatgaagattggcattaccgctatgttggggtagagtctgcaaaatatatggccaaacatcatttaacattagaagaatacataactttattaaaggagaataaccaatgaggaaacgtttttccttgctaaattttattgttgttacttttattttctttttctttattctttttccgcttttaaaccataagggaaaagtagatgctaattctaggcagagtgttacctacaccaaagaagaatttatacaaaaaattgtgccagatgcgcaagatctaggaaagtcgtacggtattcgtccttcatttattattgcacaggcggctttggattctgatttcggagagaaaatattagctaataagtatcataatctgtttggtttgcttgcagaaccaggaacgccctcaattaccttaaatgatagtagtacaggaaaaaaacaggaaaagcaatttactcattataaatcttggaagtattcaatgtatgattaccttgctcatataaaatctggagcgacaggcaaaaaagattcatatactataatggtgtctgttaaaaatccaaaaactttagtgcaaaaattacaagatagtggttttgataatgacaaaaagtacgctaaaaaaatgacggaaatcattgatttgtatgatttaacaagatatgataagtgatattagcactctttgaataagagtgctaatttttgatgttttttccttgactatcttttaaaaaggagtataataaaatcatagttagcagtcgatgtgtaagagtgctaatttcagaaagaccgagaggggtgatgtttttgtgattacacaacgtcaaaatgatattttgaatttaatcgttgagttatttacacaaactcatgaaccagtagggtctaaagctttacagagaacgattgattctagtagcgccactattcgtaatgatatggcaaaactagagaagttggggttattggaaaaagcacacacttctagtggacggatgccgagtccagctggttttaagtattttgtagagcactcccttagactagatagtattgatgagcaagatatttatcatgttataaaagcttttgactttgaagcattcaaattagaagacatgcttcaaaaagctagtcatattttatcggagatgacgggctatacatccgttattttagatgtggagccagctcgtcaacgtttgacagggtttgatgttgttcagcttagcaaccatgatgctctagcagtcatgactttagatgaatctaagccagtgacagtgcagtttgctattccaagaaactttttgacacgtgacttgatagcatttaaagctatcgtagaggagcgcttgctggatggtagtgtcatggatattcattataagttgaggacagaaattcctcagatcgttcagaagtattttgtaactacggataatgttttacaactatttgattatgttttttcagagctgtttctggaaacggtatttgtagctggcaaggtaaattctttaacgtattcagatctatcaacgtatcagtttttggataatgagcagcaagtagcgatttctttgaggcaaagtctgaaagagggtgagatggcttctgtccaagtggcagatagtcaagaagccgcacttgcagatgtgtcagttttaactcacaaatttttgattccttaccgtggatttggactcctgagtttgattggtcctattgatatggattatcgtaggtctgttagtttggtaaacattatcggaaaggtattggctgctaaattaggtgattattatcgatacctaaattctaaccattatgaagttcactgataatggcagtattcaataagttatttaaaaggaggcactcagtgtcagaagaaattaaaaaagacgatttacaggaagaagtggaagccactgaaactgaagagacagttgaggaagttattgaagaaattcctgaaaaatcagagttagaactcgcaaacgagcgtgctgatgagtttgaaaataaatacttgcgagctcatgcagaaatgcagaatatacaacgtcgctctagtgaagaacgtcaacaacttcaacgctatcgttctcaggatctggcaaaagcaatcttaccatcgcttgacaatctagaacgtgccttggctgttgaagggttgacagatgatgttaaaaaaggtttagaaatgactcgtgatagccttattcaagcactaaaggaagaaggcgtagaagaagtagaagtcgactcatttgaccacaactttcatatggcagttcagactctcccagccgatgatgaacatccagccgatagcattgcagaagtctttcaaaagggatataaattgcacgagcgtctgctaagaccagcgatggtagttgtctataactaaggtaaatgagttttcgtttttgtccgtaatgacagtaaactagatagcaagttagaagctattcagcttgctgattaaactatagtgattgcttagaattggaagtaaaataattcgagtgcttactaagataaattgaaataaaaagtaataaagtattataaaataagaggtattaacatgtctaaaattattggtattgacttaggtacaacaaactcagcagtagcagttcttgaagggactgaatcaaaaatcattgctaacccagaaggcaatcgtacaactccttcagtagtatcattcaaaaatggtgaaattatcgtgggtgatgctgcaaaacgtcaagcggtaacaaatccagatactgttatctctatcaaatcaaagatgggaacttctgaaaaagtttctgcaaatggtaaagaatatactcctcaagaaatttcagcaatgattcttcaataccttaaaggttatgctgaagactatcttggagaaaaagtagaaaaagcagttattactgttccagcttacttcaacgatgcacaacgtcaggcaactaaagacgctggtaaaattgcaggtcttgaagtagaacgtatcgttaacgaaccaacagcagccgcacttgcttatggtatggacaagactgacaaggatgaaaaaatcttagtttttgaccttggtggtggtacatttgacgtatcaatccttgaattaggtgatggtgtcttcgacgttcttgcaacagcaggtgataacaaacttggtggtgacgactttgaccagaaaattattgatttcttggtagaagaattcaagaaagaaaatggtattgatctttctcaagacaaaatggctcttcaacgcttgaaagatgctgctgaaaaagctaaaaaagacctttcaggtgtaactcaaactcaaatttcattaccgttcatcactgctggttctgctggtcctcttcacttggagatgagcttatcacgtgctaaatttgacgatctcactcgtgaccttgttgaacgtacgaaaactccagttcgtcaagctctttcagatgcaggcttgtcattgtcagaaattgatgaagttatcctcgttggtggatcaacacgtatcccagcagttgttgaagctgtaaaagctgaaactggtaaagaaccaaataaatctgttaaccctgatgaagtggttgctatgggtgctgctatccaaggtggtgttatcactggggatgtgaaagacgttgtacttcttgacgtaacaccattgtcacttggtatcgaaacaatgggtggtgtcttcactaaattgatcgaccgcaacacaacaatcccaacatctaaatcacaagtcttctcaacagcagcagacaaccaaccagccgttgatatccatgttcttcaaggtgaacgcccaatggcagcagataacaaaacactcggtcgcttccaattgactgatatcccagctgcacctcgtggaatcccacaaattgaagtaacatttgatatcgataaaaatggtattgtatctgttaaagctaaagatctcggtactcaaaaagaacaacacattgttatccaatctaattcaggattaactgatgaagaaattgataaaatgatgaaagatgctgaagcaaatgctgaagcagatgcaaaacgtaaagaagaagttgatcttaaaaatgaagttgaccaagccatctttgcaacagaaaaaactattaaagaaactgaaggcaaaggctttgatacagaacgtgatgcagcgcaatcagcacttgatgagttgaaaaaagctcaagaatcaggtaaccttgacgacatgaaagctaaacttgaagctcttaacgaaaaagcacaagctcttgcagttaaactttacgaacaagcggctgcagcacaacaagcagctcaaggggctgaaggtgcacaatcagctgattcatcaagcaagggtgatgatgttgtagatggcgaattcactgagaaataattattaatattgttcagattcatttgaatataagcatgaaaactatactagcatagtaaagttcttcgtgataggggttgctcaataatctagataagtttcagattacataagctaatttcgctatcactaaataaaaacatattaataataaataggcggggcgcctcgctccgtctgttttattaagtgtcatatatatgttaactatttagagctgtaactgggcaagaataattgttaatctcttcaagtgtagtatatgaacaaaatataaaggattagataatgaacaatacagaattttatgatcgtcttggcgtttcaaaagatgcttctcaggacgaaataaaaaaagcttaccgtaggatgtctaagaaataccatccagatattaataaggagacgggagcagaggaaaaatataaagaggttcaagaagcttatgaaaccttgagtgatacacaaaaacgtgctgcctatgatcaatatggcgctgctggggcaaatggcggttttggtggcttcgatggtggcggttttggtggcttcgatggtggtggctttggtggttttgaagacatcttctcaagcttttttggtggaggagggatgcgcaatcctaatgcaccacgtcaaggagatgacctacaatatcgtgttaatttaagttttgaagaagctatctttggagctgaaaaagaagtatcttataatcgggagtcatcatgtcatacttgttcaggaagtggagctaagccaggtactagccctgtgacttgtcaaaagtgtcatggttcgggtgtgattaatgttgatacacaaacacctctaggaacaatgcgtcgccaagtgacttgtgatgtttgtcagggtagtggtcaagaaatcaaagagaaatgtccaacatgtcatggaactggtcatgagaagaagacgcataaagtatcagttaaaatacctgcaggagttgaaactgggcaacaaattcgtttaacaggacaaggtgaagctggcttcaatggtggtccttatggtgatctctttgttattattaacgttctcccaagccaacagtttgagcgtaatggatcaacaatttattatactttgaatattagctttgtccaagctgctttgggtgatacaattgatatacctactgtccatggagcggtagaaatgtcaattcctgctggtactcagacaggaaaaacgtttcgtcttcgcggaaaaggtgcccctaaacttcgagggggtggacaaggtgatcagcatgttactgttaacatcgtaactcctactaaattgaatgatgctcaaaaagaggcattgcacgcttttgcagaggcaagtggagataagatggtacatccgaagaagaaaggtttctttgataaagtcaaagatgctttagatgttgattaaaaaataaaagtctagaatcgaaagtattctagacttttttgtattgctagagggattgcttgaacctaaattttacagtacaatgaatctaatattgtagggggacaatttttatggtaaccaaagttgaagagattcgctcatatttgatagcttctatacaaaatggtaagttggctccaggagatcgcctaccatctataagacagttagctaatcaattttcctgtaacaaagatacagtccaacgagttttgatggaattgcgttttgataattatatctatgcaaagcctaggtcaggctattacgtctttgattctcatcaagaggaagttgaagaaggggttagtttaccaaactctgagattgcaaatatagcttatgatgattttagattgtgtttgaatgagacccttattggtagggaagattaccttttcaattattactatcgtcaagaaggtcttcttgatttaagtaaagcagtggctaaattaatggaagaaacaggggtctatgttccccttgatgatattgttattacggctggtactcaacaggcattatttattttgacacaggttacctttccaaatcgaaaatctcgagttttaatagaagaaccgacctatcctcgtatgattgaactaatcaaaacacaaaatttaccctatgaaactatttctcgaggtactcatggaattgattttcagcgtttagaggagattttccagacacaatcaattaagtttttttatgttatacctcgcatgcataatcctttgggaacatcctataatccggtagagatgaaaagattaatagagatggcagagaagtatgatgtttatattgtggaagatgactatatgtctgattttgcaagtcagtcaccattacattattatgatactcacgggcgtgttatttatctaaaatctttttcaaaggctattttccctgctttaagattagctgcgatttgtttaccacaagctttaaaatcaacatttatggcttacaagaagttgatggattatgatactaatctgattttacaaaaagcattagcgctttatattgaaaatggcctttatgctaagaatagtcaatatttgaaatatcgttatcagaaagaccttgcaaattcaaaatctattttagctgatcaccctaatctaccctcatatagtttacatcacgatagtgtattatttgattgttcgaaactcgataactttaaaatattacggcaatacggcgatactttggaaaattatttttgtcaaaaatcgcatcaatctctcttacaagtaaaaaatgattcctgcttaaagcagttcttgggatcgttgtagtataattgtagggggacagtttaaaatagataatatagttttcataaatgaaaggtggtaaaataaacccatgacaaggtataaggcacagatttcttatgatggttcagctttttcaggcttccaaagacaaccaaattgtaggacagttcaagaagaaattgagagaactcttaagcgcctaaatagcgggaacgatgtgataatccatggtgctggtcgcacagatgttggtgttcatgcttatggacaagttatccattttgatttaccacaggcgcgtgatgtagaaaaattacgctttggtttagatacacagtgtccagacgatattgatattgtcaaagtagagcaagtgtctgatgattttcattgtcgatatgataaacacattaaaacttatgagtttttagtggatatcggtaggccgaaaaatcctatgatgagaaactatgcaacacattacccttatcctgtcattattgagcttatgcaagaagctattaaagatttagtaggtacccatgactttacaggctttactgcttcaggtacgagtgtagaaaataaagtacgtactatttttgatgcgaaaattcagtttgaagcgtctaaaaatcttttaatttttacctttacaggaaatggttttttgtataaacaggtgcgtaatatggttggtaccctgctaaaaattggtaatggacgcatgcctattagccaaatcaaaacaattttacaggctaaaaatcgggatttagcaggtccaactgcggcaggaaatggtttatatttgaaggagattatttatgaagacgaggaatgttttagcaatttcaggaaatgatattttctctggcggcggcttgcatgcagatttagcaacttacgttgttaataaattacatggttttgtggcagtaacatgcttaacagcaatgtcagataaagggtttgaagtcattcctatagaggcatctatactaaagcagcaactagaaagtttaaaagatgtagagtttgggtctattaaactaggattgcttcccaatgtagaaacagcacaagttgttttggaatttgtaaaatcaaaacaagaatgtccagtagtcttagacccagtcttagtttgtaaagaaaatcatgatttagaagttagccaattacgtgagcagctaattgcgtttttcccatatgctgatgtgattactcctaatttagtagaggctcaattattgacgggtctttcgattgaaaacttagatcaaatgaaaattgctgctgagaaactttacgatatgggagctaaacatgttgttatcaaagggggcaaccgtttaaatgctgaagaggctacagacctttactatgatggtgaacgttttgaaacctatgtttttcctgtagtagatgccaataatacaggtgctggatgtacatttgcgtcaagtattgccagccaattagctatgggtaaaaatgtagaagatgcagtcaaaatgtctaaaggtttcgtctatcaagctattaaagcatcggataagtacggagttgtccaacatttttaggagattttaatgaggaaagagaaaactagtcaattggttcaattggcaattgtaacagctatatctattgtattggggatgtttataagtattccgacaccaacaggttttttgacattactagatgctggaatattctttgctgccttttactttggcaaaaaagaaggggctgtggtaggtgccttagctggttttttaattgatttattgaaaggttatcccaattggatgttctttagtttattgattcatgggacgcaagggtatttagcgggtttaccaggtagaagacgtcttttaggtcttattagtgcaactcttgttatggtattaggttatgctatagctagtggattgatgtatggttggggagctgttctaccagatattcctggcaatattatgcaaaatatggttggtatggttgttggttttgctcttaataagtctctagaaagagtgaagaaatgatactagattataataagttaaagcaggaaactaaagctattgtagttgatattattgaacgtagcgctcttaaaaaaggtcaaatttttgtactaggtctatcatctagtgaggtttctggtggtttaattggaaaaaattctagttctgaaattggtgaaattatcgttgaagttatcctcaaagagttacattcacgcggcatctatttagcagttcaaggttgtgaacatgttaatagggcgttggttgttgaagcagaattggctgaacgtcaacagttggaagtcgttaatgttgttcctaatctacatgctggcggtagtggtcaggttgcagcttttaagttgatgacatcaccagttgaggttgaagaaattgtggcacatgctggaattgatattggagatacttctattggaatgcatatcaagagagtacaagttcccttgattccaattagtcgtgagttgggaggagcacacgttacagcactagctagtcgtcctaaattaattggcggtgctagagcaggatatacgagcgatccaatccgtaaattttaaaataaacctctgctctgcagaggtttattatttatctcaacgagagtggttattggagaaattgtacgttggtaagtcaataccttcttcaagaatagctttttgataaagtttgtaaaattcagcatagatgtcaaactgagcaccgttttgcgtgaagatattaatacgataaacaaattgaccattagcattggttgtaggaccaaaaacagtaggctctccaacgatagcagggtgttttgaaacatactcttcattgatttttgttacaatatcagaaatctgatcaaggtttgtatgaacaaataaaggaatatcaatttgagcacgcatattgctacgagacttattgctgacaattgtaatattacgattaggaatgaagtgcaaggttccatcgaaatcatgaatttgtgtggtgcgtatcccaacattagtaacagtgcctgatacagtaccaacattaataatatcaccaacatcaaattggttttctagcagaataaaaaagccattgacaacatctgataagaagccttgagcaccaagtccaatagcaaccccagcaataccagccccagctaataaactagaaattggaacgcccaatatacttaaaatccaatagaatagaaagaaataaagggtatagtttaaaacattgtgagaaagtttagctaatgttttttgacgagctactttttgtctagaaaaggcgagtgagcgattaacagtcttttcgaaaagataattgatgacttgcctaacgataacgaatgcaatgattaataataagattgatattagtttggtgaagaaagtaaataaaacttcctctacattaagatggtctataaatttttctaaagtaatcatagtaatagtctagtaaaaaaaaagccatagagcaagtattttaaaagcttatcgttaagcagtttaaagcttcttttttgcataaaaactttgtaaaacgttttaaattatggtaaactaaactgtatctaaataattttaaggagaaatgacttaatgtctacatcatttgaaaataaagctacaaaccgtggtattatcacatttacaattagtcaagatgagatcaagccagctcttgatcaagcattcaacaaagtaaaaaaagatttgaacgttccaggattccgtaaaggacatatgcctcgtacagttttcaaccaaaaatttggtgaagaagcactctacgaaaatgcattgaatttagtgttgccaaaggcttacgaagcagctgttgcagaacttggtttagacgttgttgctcaaccaaaaattgatgttgtatcaatggaaaaaggtcaagattggaagttgacagctgaagttgttacaaaaccagaagttaaacttggagattacaaagacctttcagtagaagttgatgcttcaaaagaagtttcagatgaagaagttgatgctaaagttgaacgtgagcgtaacaaccttgcagaattgactgttaaagatggtgaagcagcacaaggtgatacagttgttattgactttgtaggttcagttgatggtgttgaatttgatggtggtaaaggagataacttctcacttgaacttggttcaggtcaatttatcccaggatttgaagaacaattagtaggttctaaagctggtcaaactgtagacgttaatgtaacattcccagaagattatcaagcagaagatcttgctggtaaagatgctaaatttgttacaacaattcacgaagtaaaaactaaagaagttccagcacttgatgatgaacttgcaaaagatattgatgatgaagttgaaacacttgatgagttgaaagcgaaatatcgcaaagagctagaatcagcaaaagaaattgcatttgatgatgcagttgaaggtgcagcaatcgaattagctgttgccaatgcagaaattgttgaattaccagaagaaatggtccatgatgaagtacatcgtgctatgaatgagttcatgggtaatatgcaacgtcaaggaatttcaccagaaatgtacttccaattaacaggtacaactgaagaagaccttcataagcaataccaagcagatgctgacaaacgcgttaaaactaaccttgttatcgaagcaattgcagctgcagaaggctttgaagcaacagatgaagaaatcgaaaaagaaatcacagatcttgcttcagaatacaatatggaagctgaccaagtacgcggtctactttcagcagatatgcttaaacatgatattgcaatgaaaaaagcggttgacgttatcactagctcagctactgtaaaataattgcttattaaattttgaaaagattgggcttcccagtctttttatttgtgattattcttttgacgaatagctaaaaatagcgtaaaatagtaaatagcgaaaatttgaaaatatgacttatctattttctatctataaagaatattgctaaacaaaatgatagtcttacacaattaaggagaataactttggaattagaagtatttgctgggcaagaaaaaagtgaactttcgatgattgaagttgctcgcgctattttagagcaacgtggtcgtgataacgaaatgtacttcagcgatttggtaaatgatattcaaacctaccttggaaaatctgactcagcaatccgtgagtcattgccatttttctattcagatttgaatacagacggaagttttattccacttggcgaaaacaaatggggacttcgttcatggtatgctatcgatgaaattgacgaggaaatcatcactcttgaagaagatgaagatggcgctccaaaacgtaagaagaaacgtgtcaatgctttcatggatggtgatgaagatgctattgattacaatgatgatgatccagaagatgaagatttcacagaagaaacaccaagtttagaatatgatgaagaaaaccctgacgatgaaaaatcagaggtagaatcgtatgattctgagattaatgaaatcattcctgatgaagatttagatgaggatgtagaaatcaacgaagaagacgatgaagaggaagaagaggaagaagaggtttagacggggattttgtatttgacaaatagtcagatatagtttaaactattattcgggcacctcttatgaggtcagataaagctccctagtgatagggggctattttgtttttgggaaagatacagaatggttccagatagttttctgagtaggcccttgatcagatagtttctactagttttgactagagaagctggtattatttatcaatcatgtgttttgggttttacccgtaaactaactgttagattaacatttaatttaaggagtttttaatgacaaagtatatttttgttacaggtggtgtggtctcttctattggtaaggggattgttgcagcaagtcttgggcgcttactaaaaaaccgtgggctaaaggtgacaattcaaaaatttgatccatatattaatattgatccagggacaatgagcccttatcaacatggagaagtttatgttacagatgatggtgcagaaactgaccttgaccttggacactacgagcgttttattgatattaacttaaacaaatattcaaatgttacaacgggtaagatttatagtgaagttcttaaaaaagaacgccgtggagaataccttggtgcaactgttcaagttatcccacacgttacagatgctttgaaagaaaaaatcaaacgtgctgcgacaactacagattcagatgttattattactgaagttggcggtactgttggagatattgagagccttccgtttttagaagcacttcgtcaaatgaaggcagatgttggttctgataatgttatgtacattcatacaacgttattaccatacctaaaggctgccggcgaaatgaaaacaaaaccgactcaacattctgttaaagagttacgtggcctaggtatccaacctaatatgcttgttatccgtacagagcaaccagcaggtcaaagtattaagaataaattggcacaattttgtgatgttgcaccagaggctgttatagagtcccttgacgttgaccatatttatcaaattccacttaacatgcaagctcaaaatatggatcaaattgtttgtgatcacttgaagcttgagacacctgctgctgatatgacagaatggtcagcaatggttgataaagtaatgaaccttgagaaaaaagttaaaattgcattggttggtaaatatgttgaattacctgatgcctacctttcagttgtggaagcccttaagcactcagggtacgtcaacgatgttgctattgatctaaaatgggtaaatgctgctgaagtgacagaagataatattaaagaacttgtcggagatgcagatggtatcatcgttcctggtggatttggccaaagaggtagtgagggtaaaattgaagcaattcgctatgcacgtgaaaatgatgttccaatgcttggtgtttgtctcggaatgcagctaacttgtgtcgaatttgcgcgtaatgttttaaaccttcatggagctaattcagcagagcttgaccctaaaacaccgttcccaatcattgatatcatgcgtgatcaaatcgatattgaagatatgggtggtacacttcgccttggtctatatccatgtaaattgaaatcaggttcaagagctgcggcagcttataataatcaagaagttgtccaacgtcgtcaccgtcaccgttatgaatttaatacaaaattccgtgagcaatttgaggctgctggatttgtcttctcaggggtatcaccggataatcgtttgatggaagttgttgagttaccagagaaaaaattctttgttgcagcacaataccatccagaattacaatcacgtcctaaccatgctgaagagctttacacagcttttgtaaccgcagcagttgaaaatatgaaataactttatcgcctcccagtattaggaggcgattttatttttttagatagtttcactatcaaagtatcattagctcttttctttttctaaaaataaggtataataggttgcatgaaaaagattcgattatcaaagtttattaaaatgattgttgttattttgtttttaattagtgtagcagctagtttttattttttccacgttgcccaagttcgagatgataaatcctttatttcaaatggtcaacgtaagcctggaaactctttatatgcttatgataaatcctttgataagctattaaagcaaaaaatagaaatgacaaaccaaaatataaagcaagttgcttggtatgttcctgctgttaagaaaactcataagacagctgttgtcgttcatggttttgcgaatagcaaagagaatatgaaggcatatggttggctgtttcataagttaggatacaatgttcttatgcctgacaatattgcacatggtgaaagtcatgggcagttgataggctatggctggaacgaccgcgagaacattatcaaatggacagaaatgatagttgataagaatccatcaagccaaattactttatttggtgtttcaatgggtggagcaacagtcatgatggctagtggtgaaaaattacctagtcaggttgttaatatcattgaagattgcggttattctagtgtttgggatgaattaaaatttcaggctaaagagatgtatggtttaccagccttcccactcttatatgaagtttcaacaatttctaaaatcagagcaggtttttcgtatggacaagcaagtagtgtcgaacaattgaaaaagaataatttaccagccctctttattcatggtgataaggataattttgttccaacaagtatggtttatgacaactataaagctacagcaggtaagaaagagctttatattgtaaaaggggcaaaacatgcgaaatcttttgaaacagagccagaaaaatatgagaaacgtatctctagttttttgaaaaaatatgaaaaataatattgacaacaatatgataagttgatataatttattatgttgttaagcggggatggcggaattggcagacgcgcaagactaaggatcttgtgaccgcttttggtcgtgagggttcaagtccctctctccgcagactagtcgagttcatttggaactcgactttttgcatatttaagataaagatggagtatcacatgtcaaaagtacgtggctttgaattagttagccaatttagcaataaagagttattaccaaaacgagaaacagctcacgcagctggctatgatttaaaagtagctaaaaaaacggttattgaacctggtgaaattacattggtcccgaccggtattaaagcatacatgcaaccaggggaggtcctgtacctttatgatcgttcatcgaatccacgtaaaaaagggattgtcctaataaattcagttggtgttattgatggtgactactataataaccaagtcaatgaaggacatatttttgcacagatgcaaaatattactgatcaggctgttattttagaagaaggggaacggattgttcaggctgtttttgccccattcttattggcagatgacgatcaggctacaggaatgcgtacaggtggttttggtagtactggaaaataaaattattttacgaataatgttagaaaaggctagacttacttcttagccttttttgatgagagtaaacttatattttctctaacttggtgtgatataatgagtgtactagttatttggtaccaagctatcatattaatttagaagttataaaggaggcctgagtggctaagaaaaaatcagtcttcacctgtcaagagtgtggttaccaatcacctaagtatttgggacgttgtccaaattgctcagcctggtcttcatttgtagaagaggttgaagttcaagaagttaaaaatgcacgagttagtttgaacggtgaaaagtcccgaccgacgaagttaaaagatgtttcctcaattaactattctagaactaagactgatatggatgaatttaaccgtgttctaggaggcggtgttgtaccaggaagtttggttctgattggaggagaccctgggataggtaaatctactttattactacaagtatcaactcagctagctaataaaggtacagtattatatgtctcaggtgaggaatctgcagaacagattaagttacgaagtgagcgtctaggcgatatcgataatgaattttacctttatgccgagactaatatgcaaagtattcggtcggagattgagaagattaaaccagattttcttattattgattctatacaaactattatgagtcccgaagtatcaagtgtccaaggctctgttagccaagttcgcgaagtgaccgctgaattgatgcagttagctaaaactaataatattgctacttttattgtaggtcatgtgactaaggagggaacattagcaggccctcgaatgctagaacatatggtggatacggttctttattttgaaggggagcgtcatcacacgttccgtattttacgggcagtcaaaaaccgttttggttcgaccaatgaaataggtatctttgaaatgcagtcgggtggtctagttgaagttttgaatccaagtcaagtttttcttgaagaacgtttagacggtgcaacaggatctgctattgttgttactatggaaggaacaaggcctattttagcagaggttcaagctttagtgactccgactgtttttggaaatgctaagcgtacaacaacaggtcttgactttaatcgtgtcagtcttattatggcagttctagaaaaacgttgtggtttattgcttcaaaatcaagatgcctatttaaaatcagcgggtggtgttaaattggatgaaccagcaattgatttagctgttgctgtagctattgcttccagttacaaagaaaaacccacaaatccacaagaatcatttattggagaaattggactcactggtgagattcgtcgcgtgacacgtattgagcaacgtattaatgaggctagtaaattgggctttactaaaatttacgcaccaaagaattctctagctgggattgaaatacctaaaggcattgatgttattggtgtgacaactgttagtcaggtcttaaaagcagtgttttcaacataatgattagattcggttcagccgaatcttttttggtggcgagaaacatttcgtgaaaaataatgggcaaaatgataatataaaagggttggtatttagtaaatatcgaatgatgttacactaacaaaggagatctctatgaccacttattttgataactttttaaaaaccaatcaagcctatgctgacttacatggaacagctcatctacctatcaagccaaagacaaaggttgctattgtaacctgtatggattctcgtttacacgttgctcaagctctagggctagctttaggagatgctcatattttacgtaatgctggtggacgagttacagacgatgttctacgttctttagttatttcgcaacaacaattaggaacacgagaaatcgttgttctacaccatacagattgtggagcacagacgtttactaacgaagcttttgctgctcaattacagagagatttgggtgttgatatgcatggacatgattttcttccttttaatgatattgaagaaagcgttcgtgaagatgtggcaaaattacatgcttctccattaatcccagatgatgttgttatttctggtgctatttatgatgtagatactggtcgtatggtggaagttaaatagaaaaaatcctgtccttagcgatgggtttttttattttagaaaactagatttaaaggcaacagttaggcttatcatgccttatgctggaattcagacagaggaaacatcttttgctatactgaaactatactataaaagcggaggaaatttaaaatgaaaaaatatgatgtcattgttcttggttttggtaaagcaggtaaaacattagcagcaaaattagcaacacaaggtaaaagcgttgcaatggtcgaagaagacgataaaatgtacgggggaacatgtatcaacattggatgtattccgacaaaaacgcttttagtatcagctagcaaaaatcatgattttcaagaagctatgactactagaaatgaagttacaagtcgtttacgtgctaaaaattttgctatgttggataataaagacactgtggatgtttataatgctaaagcccgctttatatcaaataaagtggtcgaattaacaggaggagctgacaaacaagaacttacagctgatgttattattatcaatactggtgctaagtcagtacaattaccaatcccaggattagctgattctcaacatgtttatgattcaacggcaatccaagaattggctcatcttcctaaacggttaggtatcattggaggcggtaatattgggcttgaatttgcgactttatattccgaattagggagcaaagtgacagttattgatagtcaatcccgtatctttgcgcgtgaggaagaggaattatcagagatggctcaagattatttagaagagatggggatatcttttaaattatcagccgatatcaaatctgtgcaaaatgaagatgaagacgttgttattagctttgaggatgaaaaattaagctttgatgcagtattatatgcaacaggacgtaagccaaatacagaaggtttagcacttgaaaatacagatattaaattgacagaacgtggagctattgctgttgatgaatattgccaaacttctgttgagaatatttttgcagttggtgatgttaatggcggccctcaattcacatatatttctttagatgactcacgtattgtcttaaattatttgaattgtgataaggattattctctaaaaaatcgaggagcagtaccgacttcaacctttacaaatcctcctttagcaacggtaggtctagatgaaaagaccgctaaggaaaaaggatatcaagttaaatctaatagccttcttgtttctgccatgccacgtgcacatgttaataatgaccttagaggtatttttaaagttgtggtagatactgagacaaatcttattttgggagctcgcttatttggtgcagaatcccatgaattaattaatatcatcacaatggcaatggataataaaatcccatatacttatttccaaaaacaaattttcactcacccaacaatggtagagaattttaatgatttgtttaacttttaagaatatttttaaaaagtaaggcaattttgctttactttttttatcgaaaattagtgtggctattattactgattatcatttttagtgatttagtggtataatagagttgattggcaatcatctgtaagagtttgaatgatgttttgcccccttgactaattcagttaaactgaaaaagtttactatcagaaaatataggagtagaattttggctaataagattcgtgtgcgttatgcaccaagtccaacaggattgttacacatcggaaatgcgcgtactgcgctctttaactacctttatgctcgccatcatggtggggattttgttattcgtattgaagatactgaccgaaaacgccacgtcgaagatggtgaacgctctcaattggagaacttacgttggctaggtatggactgggatgaaagtcctgaaacacatgaaaattatcgtcaatcagaacgccttgagctctaccaacgttatattgatcagttgttagcagaaggtaaagcctacaagtcctatgtgactgaggaagaattagcagcagagcgtgaacgccaagaattggcaggcgaaacacctcgctatatcaacgaatttatcggaatgtcagaaactgaaaaagaagcttacattgcagagcgtgaagcagcaggcatcattccgacagtacgccttgctgttaatgaatctgggatttataaatggactgatatggtaaaaggtgacattgagtttgaaggctctaatatcggcggagactgggttattcagaagaaagatggttatccaacttacaatttcgcagtagtcattgatgatcatgacatgcaaatttcgcatgttatccgtggcgatgaccatattgcaaatacgccaaaacaattaatggtttatgaagcactcggttgggaagcgccacaatttggtcacatgacattgattataaactcagagactggtaagaaattatcaaaacgcgacaccaatactcttcaatttatcgaagactatcgtaaaaaaggttatatgtcggaagctgtctttaatttcattgcccttcttggctggaatcctggtggagaagaagaaatcttctcacgcgagcaattaattaatctatttgatgaaaatcgtcttagcaaatcaccagcagcattcgatcagaagaaaatggattggatgagtaatgattacctaaaaaatgctgattttgagagtgtttttgcactttgcaaaccattcttagaagaagctggtcgacttacagacaaagctgaaaaattagttgagctttatcaacctcaattaaaatcagctgatgagattgtaccattaacagaccttttctttgcagattttccagaactaacagaagccgaaaaagaagtaatggcagctgaaacagtcccaacagtcttatctgcttttaaggaaaagttagtatcgctttctgacgaagaattcactagagatactattttccctcaaattaaggctgttcaaaaagaaacaggtattaaaggtaagaacctatttatgcctattcgtattgcggtttctggtgaaatgcatggaccagagttaccagatactatttatttattaggtaaagaaaaatcagttcaacatatcgataatatgttagcaaaattataatataaaaagtcgtgaattttcacgactttttgtgtacttttaccaattgtatttttcaacattgtctttggtaacaaggtaaattggagaaattgtttctttctctacttttttgcctttataataatcaattgctgcttgaattgctatttctcccatcttagctggttgttgtgcaatagtggctgaaatatctccttttttaatggcatcatgggcatctggctgaccatcaattcctacgataagaacattttgcaagccagcagatttgacagcctgtgcagccccaagtgccatttcatcattttgtgcgaaaataatttggacatctttatgtccttgaatcatattttgtgtagtattcaaagctttggcgcggtcaaaattggcagattggcttgaaaggatgtcaagtttagattttgcaactgaatgaaatcctttaccacggtctacagtagcagaggcacctggtactccagataattcaaaggcttttgcttttttgcctagttttttaacggcataatccgcagccatcttaccagcagcaacgttatctgaagcgacagtagttaatactttgcctccctcactaccacggtccattagaataacaggaatattagcgttgtttgcagacttaatagctgttacaatagcttttgagtcaacgggattaatcaaaatagcatctacgttttgactaataaagttttggacatcatctgcttgacgtgcggcgtcatcttgagcatcagctaccttaatgcttatttttttattgctagcatatttgtcaataccgtctttcatcgcaacaaagtagggattgttagttgttgaaatagatacacctagtttcaaatctttagcagattttttggttacattttttgtagaattcccagaagaatttccaagtccagttttaccacatgcacctagaatgaggacaatagacatcaataaggctagaaagccaagtttttttccaaatttcatttgaaactcctttagataaaatataatgaacttatagaaattagagtaaagactattttgctactttaaagcgatcaagtaaaacagccattaaaataacgatacctttcacaacttgttgccaaaatgcagagacaccaatgatgtttaatccattgttcaggacaccaataataagagcaccaatcaatgttccaatgatacgtcctttcccaccagataaagacgttccacctaagacaacggcggcaatagcatccatctcataacttgctccagctgttggttgtgctgagctaaggcgtgatgtgataattaacccagaaatggaagccatgatacctgagatagtgtagatgataattttaactttgtttaacttaatacccgagatatacgctgctttttcattacctcctaaagcgtaaacagatttcccgaaggctgttttatgtaacaaaatatacaaaataataaaagtaagaaacatgagaatgactgggaatgggataccaacaatatagccttgtcccaaaaattggaatagaaaactatcggataagccagcggtaattgggttgccgtttgaataaactagcgttgctcctctaaagatagtcattgttgccagtgtaacgataaatggtgctaattttccgtaagaaatgaagagtccgtttagcattcccaagatgccacctaaggcaacagataaaacgatagcaataccaacgggtactccgtggccgattaatccagctgttaatgcactagatagggctaatatggacccgactgataaatcaataccgccagtcaaaataacgaaggtcatcccgaaagcgataaaaccatttgcagttacttgtaataataaattgagtagattattggttgtgaggaaattaggattaatgagtgtgataataaccattaaaccagctaacgcaatcagggttgttaactctgatatatatttcatcatatttttcactttacttacctcctgtggctagttgcataactttttcttggtcagcttcttttcgactgagttctccactgattcgaccttcgtgcattaccatgatgcggtcactaacacctagaatttcaggtaagtctgatgataccatgacaattggaacacctctgtctgctagttcattcattaattggtaaatctctcgtttagcaccgacatcaacaccacgcgttggctcatcaagaattaagactttaggagcaataccaatccatttagcgagaacgaccttttgttggttacctccagaaagatttccaacctctaaatctggtctccctgatttaatgtagagacgattaatcaattgttgcacaaatgttgtgcttgttttttcatcaaagaaaccatgtttgctaaaatctttagtgctagggagagtcatattgtccttgatattgaagtctaggatgagaccttcatcttttctattttcggtcaaaaaaccaatgccctgcttgatagcttggcttggggtagtaatagtgatttcttggtcatcaattttcaccttaccagacttctttttatcaattccaaagatagttcgcataacttcagtacgcccagctcccattaatccagaaaatccaagaatctcgcctttacggacataaaaggaaacgtcctcgaaattatctccacagaggttactaacttcaaaagcaacaggcccaatttcagaatgtttttcaggatagtaatcttccaattttcggccaaccatttttttaaccaattcgtcagaatttgtgagtgatgtttcttttgtatctacaatgacaccatctctcatgacggttacgaagtcagtgattttaaaaatttcctccattcgatgggagatatagacaacgcccactccttcttgtttcaaacctcggataactcggaaaagattttcagtttcacgatctgttaaagcagcagtcggttcatccattaccaaaatagagagttggtttaggagacttttggcgatttcaatcatttgttgttgtccaacagacaagttaccaatcgggatgtctaggggaatagtcacacctaatcttttaaaagtttcaagtgctttttgtctcattaatttttgattgagtaagccaaaagttgtcttgatttcacgtccaagaaagagattttccaagacagtcatttccggccaagtattcatctcttggtgaataaaactaataccaaattcctctgcttcttgagggtttgaaaaagttcgttcctcgccatcaatataaatagttcctgtacttgctggaaaaagtcctgttagaatgttcattaaggttgatttacccgcaccattttcacccataagcgcgtgtatttgaccagattgtaattccaaatcaatcttttctagaactttattagtaccgaaggatttggagatattcctcatgtcaattttcatggactaaactcctttctagatgataacaccagattgtagaataatatttgaatacggtgtattttcacctgtacgaataactgctttgacatcttgggtcatttgttttaaatgattgtgactgacgtactctatgctaacagagttatcaagtttagctaataaccttgataattgatccggatttgcttccttgatttcttctgctaaaatgactttttcaactaagatattctctaaatagatatcaagtacctcttggaaactaggtattccagaggtcaaagacaaatcaatctttggaatgccatttggaacaggtagacccagatctccaatacaaactcgatcagtatgcccaaggtcgtctgctaatttagcgagatgactatttaatataccagtctttttcataatgttggttgtcctccatttctttaattgtaggcatgccaccctgtgcaccaaatttttgcacggataagtgagcagctagagttgcaaaacgtaaggccttagcaatcttaaattttttcgagatagcataaccgaatgcaccgttaaaagtatcacctgcaccagttgtatcaacagctttagtttctaaagcaggaattaaatgactttcttttccatcagagtagatggctccttttgtgccgagtgttacgattagtttttcaggatatgtggctaatatatcctctagtttttggtttgggaacagctcttgacattcgtgttcatttggtgtgaaataatcgaccttatcgagcatctcaatatcagtctctctagatggtgcaggattatagagtaatttaatactatgttctttacaaaaattagcaattttcatatttgcttgatgaggaatttcattttgtaatacaactaaatcagcttctttaattattgaccactcctgagaccattttttagtatcaacttttccgttggctccaggacagtaaatgattcgattatcattattataaagagtgatttgggcaacacctgaagaagatggtatcgttcccacaaaatccgtagtaacatgatttttgtttaaattatccaaaagaatgggaccaaaagaatcctcgccaatggcaccaagaatagtaatattatctcgctcttggctaagacgcccaatagcgacagcctgattagcacctttacctcctggaaccattgaaaaacgttggccaaatacggtttctccctctttggcgatacgattggtttccataactaagtccatggaaatactaccgataatgacaatgttactcatctattttcctccttagggtttcacgttcgacataatgaacgggtaatttaatacgcttattggtaataggtaattgattagtaattttgaaaattaattcagctgctttttgtcccataatatatgatgattggtgaatagttgacaacgaagggtagataaattggctcattaaaatatcatcataaccaataatttgtacatcttcagggattcgcttccctcgattaagaatctcgtgtaggtaggcaatagcatgtatatcagatggagcgataatgctatcaatgtctggatggtggtcaagtaaagttttcgcttcaatttgaatctctgcaaaatcaaaactggcactatcttcgatagcaaaacaagcccctttgtttaataggtaattttggcttccttgaaacctttgattaaggttatcagctttatctagcggaccacgaatgagtaatatattggtagcacctgctgtccaaatagcttgagctgctaattttcctccctctttattatcagagaaaacgccgtactgtgtttcttgattaacgcggtcaacaactacaactggaatatctatttcaggatgatttttggtgaaatcgtgtgttgtaataatccctgcagcattactttgtaatagcacatttaagtactcttcttctaaatggctcttgttatttgtgttgccaagcatgacacgataaccctgttcttttagaaattcttcaactcctctagcaagtcttggaaagaaagggtttgaaatatcgggaagtagtaatccaacaagttgattttttttggttttcagagattgtgcaaggaaatttggaacataatggagttcgcggatagcttgctcgattttttgacttgctttttgactaacgtaaccattttgggatatataccttgagacagtagatgttgatacgccagctttctcggcgacttgtctaatcgtactcatagaaactcctttcttatattgtggaaacggtttcacaattagaattgtaatcgcttactaaaaaattgtcaagctattttttaaataatttaatgataaaatatcattatttttagaggtcatattcaagtcataaagctgtgatactatgttcacatcaaaagatcaaaggagaaaaaccatgtcacatgcttggaaagaattaaccttttataagaaaaaatacctcctgattgaattgctaatcattgttatgatgttcatggtagtttttttatcaggtttagcaaacggtttaggtagagctgttagtgctgctattgaaaataacccagctcaaacctatattttgaatgaaggtgctgaacaagtgattacatcatctgtattgacaactaaagatcagacagatttaaacagtttgaatttaaaagatagtaccactttaaatattcaacgttcgagtttaactcgacaaggacacgaaaagaaaattgatatttcttattttgctattgataaagattcttttatggcacctacactttctgagggaaaacaactgacaagttacaaaaaagctattattttaaatgatagtttaaaagctgaagggataaagttaggtgataaagtgattgataagtcatcatctatatcactaacagtcgttggatttgtccataatagtatgtatggtcacggacctgtggcatttattgataaagacatttataccgaaattaataaaaagattaatcctcaataccagttcttacctcaggcattagttatgaaaaatgataaaagtatatctcatttaccaactcaattagaagctgttagtaaaaaagatgtcattcaacatattcctggttatagtgccgaacaatccactttgaatatgattttatgggtccttgtcgtagcttcagctggtattttaggtgtctttttctacatcatcacacttcaaaaacgtcatgaatttagcgtcatgaaagctattgggacaaaaatgtcagagattgccctatttcaattgagtcaagtcattatattggcactgtttggtatcattgttggagatggattggcggttgctctctcttatgtattaccagctcaaatgccatttgttattaattggcaaaatattattctagtatcgtttgtatttttagtcattgcaatgattagtagtgctttgtcaattgtaaaagttgctaaaatcgacccagtcgaagttattaatgggggaggagaataatgtcagcaatcttagaattaaaacacatctcaaagcactatccagatggagatgagcttttatcaatattagataatttagatttatcagtttctgcaggtgagtttgtagctatactgggaccctcaggttcaggtaaaagcacacttttatccattgcagggttacttcttggcgcagatcaaggtagtttgtatgtcaatcatgagaacgttacggatttgtctcaaagacaaagaacacaattgcgccgtgaagcactaggttttatatttcaaagtcatcaactgcttccttatttaacaatccaagaacagttgcaacaagaggctcgatttgcaaaacactatgataagaaaacaagcttggaagaaattaataaattattatcagatttaggaatagagcagtgtgcacataaataccctaaccaattatcgggaggacaaaagcaacgcgcagcaattgctagagcatttattaatcatcctaaggttatcttggcagatgagccaacagctagccttgatgaagaacgtgggcgtcaagttacagaacttattcgtcaggaagttaaatcacataatactgcagctattatggtgacacacgatgagcgcgttctagatttagtagataccgtttatcgtttaaaggacgggaaattagttaaagaaaacttctaacttgtgttacaataagctagaggtgatttaatgattaaaatattagttgtagaggataacattgttcaacaaaaaatcattaccacaaaattaacacaagagggctaccaatttatcactgcttcaaatggacaagaagctctaaattgtctagatacagaagaagtacaattgattataactgatatcatgatgcccatgatggatggttatcaattaattcaagaactcaggtcagctgcttataatgttccaatcattgttatgacagcaaaatcacaaatggaagatatgacaaaagggtttggccttggtgcagatgattatatggttaagcctgtgcagttacaagaattagctttacgtattaaggcactcttgaggagagctaatattgtagctcaacatcagctaattattgggaatacttgtcttaatgaagatgaattaagcttgaaatattttgagcaagaaattatatttcctcagaaagaatttagggttcttttccacttacttagctatcctaataggattttcacacgtttagaactattggatagtatttggggaatggatactgatttagatgagcgggtggtagatgcttgcatcaataaaattagacgaaaagtagaacacttaccagattttaagattgagacggtgagaggggtagggtatcgtgcaaaaaatgactaagctaaggcgatttcggtttccgttaagattttatttcacattaatgtttgtgttaacgatgcttttctcagtcctagcttctcttttactagttgcagcaatagtttttactttttttcaaggagtcttaactactcatgtattacaagttagtgctctcgctgttgtttttttaagccttgtgatagctagtattagtatgtggtacggttcttatcatttaacaaaaccaattttagatattagccatattgtgtccaatgttgcagacggtgactttgaagggcatatttatcgaaacagtaatcgtcgtaaatcctatgagtattataatgaattggatgagctatctgaaagtattaatcagatgattgtttctttatctcatatggatcatatgcgaaaagactttatcactaatgtttctcatgagctaaagactccgattgctgcagtagctaatattgtagaactattacaagatccagaattagatgaagaaacacaaagtgagttattaggtcttgttaaaacagagagcctaaggttaacaagattatgtgatacgatgttgcaaatgtcgcgcgtggataatcaggagactattggggagctatcctctgttcgtgtagatgaacaaattcgtcaagcaatgattagtttaacagaacgttggcaagctaaaaggataaattttcaactggattcaaaaccatatactgtttactcaaactctgacttgctgatgcaagtttggataaaccttttagataatgcaataaaatattccgaggatattgtagacttaagtgtacgaatggaagaaactaataatcattatctgagagttattatttctgataaaggtaggggaatttctcaatatgatgttcagcatatatttgataaattttaccaagcggatcagtcgcataatcaacaaggaaatggattaggactagcaatagttaaacgtataattgttctttgtaagggacgtattagtgtctccagtcagttggaaattggaacagaattttgtgtagaactacctttatcataattatttaaaacaataactgccaattggcagttattgttttatttgtttagaaataaatatactaaaaatagacaaaaactataaaaatatttgacaataaatatagcaagtgtataatattacaaaacataggaatttggaaggggattttttatgggaaaagaaaaattaattttagcttattctggtggtttagatacctctgttgctatagcttggttaaaaaaagattatgacgttattgctgtctgtatggatgttggcgaaggtaaagatcttgattttattcacgataaggctttaacaataggtgccatagaatcttatattttagatgttaaagatgagttcgctgagcattttgttttaccagctttacaggcacatgcgatgtatgaacaaaaatacccgcttgtttcagcgcttagtcgtccaattattgcccaaaaattagttgaaatggcacatcaaacaggtgcgaccacaattgcacatggctgtacaggtaaaggaaatgaccaagtgcgttttgaagttgcaattgcagcactagatcctgaattaaaagtaattgcccctgttcgtgagtggaagtggcatcgtgaagaggaaattacttttgcaaaagctaacggcgtacctattccagcagatttagataacccttattctatagaccaaaatttatggggacgtgccaatgaatgtggtgtgcttgagaatccttggaatcaagcgccagaagaagcttttggtattacaaaatcaccagaagaagctcctgattgtgcagaatatattgatattacgttccaaaatgggaagcctatagctataaacaatcaagaaatgacactagcagatttgattttatcgctaaatgaaattgcaggaaaacatggtattggacgcattgatcatgttgaaaatcgtttagtcggtatcaaatcacgtgaaatttatgaatgtcctgcggcaatggtactgttagctgctcataaagaaattgaagatttaacactagttcgtgaagtgtctcattttaaacctatccttgaaaatgaactatcaaatcttatttataatgctttatggtttagtccagctacaaaagctatcattgcctatgtcaaagaaacacaaaaagtggttaatggtactacaaaagttaagttatataaaggttctgcccaagtcgttgctcgccactcatctaattcattatatgatgagaatttagcaacctatacagctgctgatagctttgatcaagatgcagcagttggttttatcaaactctggggacttccaacccaagttaatgcccaagtaaacaaaggataaataaaggaagataagaggatgacaaaaaatcataagttatggggtggtcgttttgaaagtagtcttgaaaaatgggttgaagagttcggtgcatcaatcagtttcgaccaaaaattagctccctatgatatgaaggcttctatggcccatgtcacaatgttaggcaaaacggatattattagtcaagaagaagcaggcttgataaaagatggtttaaaaatactgcaagataaatacagagcaggtcaattgacttttagcatatcaaatgaagacattcatatgaacatagagagcttattaaccgctgaaattggagaagtagcaggtaagcttcatactgcacgttcacgaaatgatcaagtggctacagatatgcacctttatttgaaagataaattgcaagaaatgatgaagaaattgcttcatttacgaacaaccttagttaatttagcagaaaatcatatctatactgttatgccagggtatacacatttacaacatgctcagccgatttcatttggacatcatctaatggcttactataatatgtttacgcgtgatacagagcgattagagtttaatatgaaacacaccaatctatcaccattaggagctgctgctctagcagggacaacgtttcctattgaccgccatatgacaactcgtttattagattttgaaaaaccatatagtaattcgcttgatgctgtctcagatcgtgactttatcatagaatttttatccaatgctagcattttaatgatgcatttatcacgtttttgtgaagaaatcattaattggtgcagttatgaatatcaattcatcacattatcagatactttctctacaggatcatctattatgcctcaaaagaaaaatcctgatatggcagaattaattcgagggaagacaggccgtgtttatggaaatttatttagtttactaactgttatgaaatcattgccgttagcttataacaaagatttacaagaagataaagaagggatgtttgatagcgtagaaacagtcagcatagctattgaaatcatggctaatatgcttgagacaatgactgtgaatgagcacataatgatgacctcaacggagactgatttttcaaatgcaacagaattagcagattatttagcaagtaagggggtacctttcagaaaagcacatgaaattgtaggtaaattggttttagaatgcagtaaaaatggttcttatttacaggatatacctttaaaatattatcaagaaatttcagagttgatagaaaacgatatctatgagatattaactgcaaagacagcagttaaacgaagaaattcattaggaggaacggggtttgaccaggttaaaaaacagatcctattggcacgtaaagaattgaaagcggaatgactgctttctgaaaaaaccctcgtttaactctgttaagtttctcacgtattttcagtaaaaaactagcattttttatagaattgtgctagaattaacgtgtaagtgggcaacgcccaaaaaataaataggaggcctgaataatggcaatcgtttcagcagaaaaattcgtccaagcagctcgtgataacggctatgcagtaggtggatttaacacaaacaaccttgagtggactcaagctatcttgcgcgcagcagaagctaaaaaagctccagtacttatccaaacttcaatgggtgcggctaaatacatgggtggttacaaactttgtaaacaacttattgaaactttggttgaatcaatgggtattactgtaccagttgctatccaccttgaccacggtcattacgatgatgcccttgagtgtattgaagtaggttacacttcaattatgtttgatggttcacaccttccagttgaagaaaaccttgaaaaagcacgcgaagttgttgctaaagcacatgctaaaggtatttcagtagaagctgaagttggtactatcggtggtgaagaagatggtattgtcggtaaaggtgaattagcaccaatcgaagacgctaaagctatggttgaaactggtattgacttcttggctgcaggtatcggtaacattcatggaccatacccagcaaactgggaaggacttgaccttgatcacttgaagaaattgactgaagctgttcctggtttcccaatcgtgttacacggtggttcaggtattcctgatgatcaaatccaagaagctatcaaacttggtgttgctaaagttaacgttaacacagaatgtcaattagctttctgtcaagcaactcgtgactacgctgttgaattcaacgctaacgaagctgaatacatgaagaaaaaactctttgacccacgtaaattcttgaaacctggtttcgatgcaattacagaagcagttgaagaacgtattgacgtgtttggttcagcaaacaaagcataattaacataaacagataatagttaaaagctcacttatggtgagctttttttggattatatgactttttattaaatagatactctttaaagattgatatgcttaagataatttcgaataaatgccgctgaatctgtgagttgttgctcttcttttgggcttagtgaaagagaaattctttctacaattcctactctaccaataatagctggatatccaaggtaaaccccttcggactcatagaaggtagatacaggtagtaactcatgggaatcatttaacacagttaaaacgatgcggacagctgcggtagcgataccataactagtatattttttaccaaaaaagacagtgtgcccgccttttaaagaagcttcttttatctgttctaattcttctgcttttaatagtgatatagctggttgtccttttacagttacctgactccaagcgacaaattgggagttaccatgctctcctagattataaccaccgatactccttggatcaacttgtaggcgttgaccaagcactcttttcatccgagcagtatccaataaggttcctgttccgataacgcgtgatttaggaaattgagtatattcttgataaagctgggtaatggcatcaacaggattagtaacgacaataaggatccctctaaaaccagatgattttaacttttggctaacgtcgtagacttctttactggtaaatggtagttcagcaaagcgattagcttctttgttattctgtagtgaaatatcacctaaggctgaaatcacaacatcagcatctgacaacgcgtcatagtcgtttaatactagattagcgtgataagtagcatttgccagagcatcttgaaaatcaatcatatcagcattaaccttatcaacattagtatcaataaagacataatcatcaccaataccttgtgcaataagagcgtgtgcaacagttgatccaacgtgccccatgcctataattccaattttacgtgtcatatgaaacctcctttgattattgttgtctattataatattttgaaagaaaatgtaaactaaaaaatgaattagaaggaagtgtgtcttattataaaaaatatgtaagcgatttagataaaacaaatgaaaaagtaattttgaaaagaacttgctagaagaagtaagttgtgatagaatagtctagtatgtggtgctagcacatccgtaaatattgatcaatataggaggaactcgtaaaatggctaaagtatgttatttcacaggacgtaaaacagtttctggtaacaaccgttcacacgcgatgaaccaaacaaaacgtactgttaaaccaaaccttcaaaaagttactgttcttatcgacggtaaaccaaaaaaagtttgggtttcagctcgtgcgcttaaatctggtaaagtagaacgcgtttaataaactgagaaagccttagggctttttttagtgtttctaaggctgatttgatagttagatgcctctatttttttacaataatagtgagatatgatagaatagagtgataaaaactttttgaggtagtagatatgactgtaaaaatcaatacaagagatggtcaaattgaactctctgatgacgttattgcaactgtcgttggaggttcagcaacggaaatttttggcgttgttggtatggcaagtaaaagtgctatcaaagataactttcaagcacttttgcgtaaggaaaactacgcaaaaggtgttgttgtgaggtctagtgaagcgggcatcgtagtagatgtttatactgtcatgagttacggcgtcaaaattagtgaagtttcaaaaaatattcaagagcgagtgaaattcaatctcgaaaatcagcttggtttatctgctgatatggtgaatgtttatgtgcaaagtattaaggttgtaggagaagattagtgtcaaagattacgacaagtttattccaagaaatggtacaagctgccagtacacgtctgagtaaacaggcagagtatgtcaactcattaaatgtattcccagttccagatggtgatactggtacgaatatggggatgactatggaaaacggagccaaggaagtttcggacaaaccagcgacgactgttggagaagttggtcaaattctttctaaaggtgtattgatgggagcacgtggaaattcaggtgtaattacatcacaattattccgtggttttggtcaaagtatcaaggataaagaagaattaacgggtcaagatttggcacacgctttccagaatggtgttgaagtagcttataaagccgttatgaaaccagttgaaggaactatcttgacagtatcacgcggtgcagctaccgctgctctaaaaaaagctgaagaaactgatgatgcagttgaagttatgcgcgcaactctcaaaggtgctaagcgtgctcttgctaaaacaccggatatgctacctgttcttaaagaggttggtgttgttgattctggtggtcaaggactcgtctttatttacgaaggtttcctctcagcactgactggggaatatatcgcatcagaagattttaaagcaactcccgcaacaatgactgaaatggttaatgcagagcaccataaagctgtagtaggccacgtagccacagaagatattaaatatggctattgtacagaagtcatggttggtttaaagcaaggaccaacttacgttaaggaatttaactacgaagaatttcaaggttatcttagcaatctaggggattctttactagttgttaatgatgatgaaattgtcaaggttcatgttcatacagaagatccaggtcttgttatgcaagaaggtttgaaatatggatcgcttgtgaaggttaaagttgaaaacatgcgtaaccaacatgatgcccaaatgcaaaaggttgaagttgaagaaactgtcaaagaaactaaagaatatggtattattgctgttgtagctggtgacggtctagctgagatttttaaatcacaaggtgttgattatatcatctctggcggccagactatgaacccatctacagaagatattgtaaaagcgattgaaaaagtaaacgctagaaatgttattattttaccaaacaataagaacatcttcatggctgcacagtcagctgcagatgtcgttgatattccagcagcagtagtagagacacgtacagttccacaaggatttactagcttacttgcttttgatcctgctaagtctcttgaaactaatgtagctgatatgacaaatagcctctcagatgtcattagtggtagtgtgactttagctgttcgtgatacaacgatagatggccttgaaattcatgaaaacgacatccttgggatggttgatggtaaaattctagtatctacaccagatatggaaaaagcacttaaagacacttttgataaaatgattgatgaagatagtgaaatcgtgacaatctatgttggtgaagatggtaagcaagcattagctgagaccttgtcggaatatcttgaggaaacttatgaagatgttgaagttgagatccaccaaggagatcaacctgtatatccatacctcatgagcgttgaataattgataaaataaaaaattaggagagatacttctaattttttattttatcagagtttctattttagtatgataaagcatcagtattttgaaaattttgacaaattgtgttagaattgttttaaaacattcatacaaaggagatttatgatgtcattaattattcttacggttattttggttttagtgattgttctgttgataacttctttatacgttgttaaacaacagacagtagccatcattgaacgctttggtaaatatcaaaagactgctactagcggtattcatattcgtgtaccattgggtatcgataagattgcagcacgagtgcagttacgtcttttacagagtgaaattatcgttgagacaaaaacaaaagataatgtttttgtcactttaaatattgctacacaatatcgtgtcaatgaaaataacgttacagacgcttattacaaattaataaagccagaagctcagattaaatcttatatcgaagatgctttgcgttcatcagtacctaaacttacattagacgagctatttgaaaagaaagatgaaatagccttggaagttcaacatcaagtggcagaagaaatgtcaacatacggctacatcattgttaagactttaattactaaggttgagccagatgcagaagtaaaacaatccatgaacgaaatcaatgctgcacaacgtaaacgtgtagcagctcaagaattagcgaatgctgataagatcaaaattgtaactgctgcagaagcagaagcagaaaaagatcgtctacatggtgtgggtattgcgcaacaacgtaaagcaattgtagatgggttagctgattcgattcaagaattgaaagatgctaacgtgacattgacagaagaacaaatcatgtctatcttgttaacaaatcaatatttagatactttaaatacatttgctattaatggtaatcaaacgattttcttaccaaataacccagaaggtgttgaagatattcgtacacaagttttatctgctcttaaaacaagataatgaactttttatagaagcaaaataaccagagcatttgctctggttattttgtgtctgacttatttattataattggagagacggaaaaaagttattttttaccgtaacgtttgtactcatgaatgattttcagagcacgttttctagttttaatgttaggacttttaagtctgcgataggctgacgataggtctgttttttcagccatgattacctcctatagacaatttattaacgttaacagacaccagtataccacaaaaaaattaactggtaaagtactttgttgataaatttaaaaataaatagcaaagtaattaaatatcaatcaaaagtaataagttcaaagatatattaaacctttattaatgaggtttggatttgacaagtgatgttaagtgaaagatgaatgaggaaaatacccaacgagaaagtagctaatggctatcattgtgcatataaaaaaacgatcgatgagtgatcgtttttcagcaaactaaataattatttttaatgtaattgaatgaaaatttatacttgtgaaagtgtatcggttaagttaataaggtcagtttttatttatcgtaagcacttaggaagtgttttggagcatacccacgagagtagataaatccggcatcgcgtgaaggatagcttgattcagaaggcgcatacccacgagagtagataaacccggcatcgcgtgaaggatagcttgattcagaaggcgcatacccacgagagtagacaaatccggcatcacgtgaaggataagacactgtgtctgccttcgcaagacttgctaaagtagctaataatagagtgacagctgaagctgctgttaaaacactgattttaagtttcattataaaatcctttcaaagataataaactattcttgcacagtggttagttcattttgtgcatactatattatatcatcaaaagctcattcgaacaacatgtttttaattttaaacaaatatatgattaatcaaatatcgcttaaaattaaaaaatgagatttagtaacttatttaatagtatacaatccaataacgactgtctaatttaatctatagttgaagctagtcgtggatttcactaaagatgtagcaataaaaaatcccctccagttccattgcaatgatgacaatgacaaaacctgtaggggtataaatagtctatatttaaatgtgaataaattttattttaagaagcgttgtagaaattccttagttctttcttgtgttggattttcgaaaagttgtttaggagtaccctgctctgcaatgattcctttgtccatgaaaataacgcggtctgatacttctttagcaaattccatctcgtgtgtcacaattatcattgttaatccagatttagctagatcttgcattgttttaaggacctcaccaaccatttctggatccaaggctgaagttggttcatcaaaaagtatagcttctgggttaacagaaagtgctcgggcgattgcgacacgttgcttttgcccacctgataattgttttggtttagctttccaatattgctcagtcatgccaacagcatttaagttttctttagcaatcttttcagcttcttggcgttcacgttttagaacagtagtctgtgcgacaatagcattctctaagatatttaaattttcaaagaggttaaaagattgaaagaccatcccaagtttttcacgataattatttaaatcatagcctttttcaagaacattgtgaccgtgatataagatttctcctccacttggttcttctaagaggttaatagaacgtaggaaagttgattttcctgatccagaagaaccaatgatagaaataacttcgcctttgttgaccgaaagcgaaatatcttttaacacttcattgcttccgtaagattttttcaaatgtttaatttctaaaatagcttgtgtcataccaacctcctagacttgtaattgattcgcaccggttgtgtaattatctgaatcaaaacgtttttcaatgtaacgtaagatacgtgttacggtgaaggttaagatgaagtaaataatcgcaataatggtgaatgtttggaaatattggtaggtttgtgttgcaacagtattaccagagaagtagagttcgacaacagagataacgttcagtacagaggtatctttgatattgataacaaactcattaccagtagctgggagtatgttacgtacaacttgtggtagaacaatttttcgcatggtttgtccgtgggtgaaaccaagtgcagttgcggcttcaaattgtcctttatcaacagagaaaataccaccacgtacaatttcgctcatataagcaccagtattgattgaaacaataaatatagctgctagtgtacggtccagcgaaactccaaaagcttgtgctgttccgtagtagataaccatcgattgtacaatcataggtgtcccgcggaagacctcaatatagatgttaagtaaccaacctaataatttttgtaaggcagcctttaacttattgtcagattttggtgctgtacggaaaacaccgatgagaaggccgataaataatccgacgattgttcctaccatagaaattaggagggttgtagctgttcctctgaggaattgagaaccattgttttttaaaatagttgccatctgttcaaagaagtttggtttcccatttttttcttttttaacggatggctgttctttaatcatcttatccatcaaggcgatttgtttatctctagaaatgctttcgagaacttgattaacttgattaatacgattgtcacctttacgcatcccaacagaaatatttgtatcggcatcagatgttttaaacccttggtgcagttcaatcatttttaatttaggattagcagtttgagcggaagttgcatctggacgttctgaaacataggcgtctacaacaccagattctacagcttgtcttaattgattgaagtcccccatggcaacttcttttttgacaccattgatttgatcaatgaggttgtataagtagactccttgttgggcagttactttagcatttttgaaatcactaatatttttagcattagtatattttccttcagcattaacaactagagtaggttctgaaatgtagtaaggctttgaaaaattaatttcttttttacgttcttcggtaggactcattcctgcaataatcatatcgagttttccagaagttagtgctggaacaaggccttcccattttgttttgacaacaacaacttttttatttaactttttagctaactttttagcgacttgtacatcataaccattagcatattgatcagttccttcaataggaactgcaccatttgtgttatcattttgtgtccagttgaaaggagcataggctgcctccataccgacacgtagatattcatctgcttgtatacttgtcatacctccaaaggtgataagcaaagcagtgaataaacttagtaatatttttttcattcaacagcctccgataagttacttcctcctattttaccgaaaaacaaggtcgatttcaatatcattatcttattgaaagcgattaattgtatttttatgttaaaatggtatacaaacaaaggaaggaggatgataatgaagaaatgttttttggctatttgtttagctcttagtttttttatggtttcagttcaagcagatgaggtggactataacattcctcattatgagggtaatctaactattcacaatgataatagtgctgattttacagagaaggttacttaccaatttgattcgtcctataatggacagtatgtcacattaggtacggcgggtaagttacctgacaattttgatattaataataagccacaggttgaagtttcaattaatggtaaagtaaggaaagttagttaccagatagaagatttggaggatggctaccgtttgaaagtgtttaatggtggtgaagcaggtgatactgttaaagtcaatgttcagtggaaactaaaaaatgttctatttatgcataaggatgttggtgaacttaactggattcctattagcgactgggataaaacgttagagaaagtagatttttggatatcaactgacaaaaaggttgctctttctcgtctttgggggcacttgggttatcttaaaactcctcctaaaataagacaaaataataatcgttaccatttgacagcttttaatgtaaacaaacgattagaatttcatggttattgggatagatcttattttaatctacctacaaacagtaaaaataattacaagaaaaaaattgaatatcaagagaagatgatagagcgtcatggttttatcctaagtttcttgttaaggatattattaccttcattctttattattgtgacactattcatctcaattagggtgttcctgtttagaaaaaaagttaataaatacgggcaattccctaaggaacatcatttatatgaagcacctgaggacctttcaccactagagttaactcaaagcatttatagtatgagttttaaaaattttcaagatgaggagaagaaaactcaccttatcagtcaagaacaactcattcagtcaattctattagacttgattgatagaaaagtattgaattatgatgataacttgttatctctagctaacttagatagagcttctgatgcagaaatagattttatagagtttgcttttgcggattctacgagtttgaagccagatcaactcttttctaattaccaatttagttataaagaaacactacgtgaactgaaaaagcagcacaaggcttcagatctgcaaactcaaatgagacgccgaggaagtaatgccttatcaagaattacgcgtctcacaaggttgatttctaaagacaatataaactctcttagaagaaagggaatttcatccccttatcgtaaaatgtcttcagaagagtctaaagaattatctaggttgaaaagattcagttacctatcacctcttatttcttttgttgttataatttatacgctttttttaaattattttacctatttctgtatctatctcttattgtttggtgttatcctgttgttgaataaaatcatttttatgatgacaagaaaaataagtaacggttatattgtaactgaagatggagcaagtcgtgtctaccaatggactagttttaggaacatgctaagggatatcaaatcgtttgatcgttcagagttagaaagtatcgtattatggaatcgaatattggtttacgctactttattcggctacgctgaccgtgttgagaaagcactcagagtgaaccaaatagatattccagaaagatttgcaaacattgatagtcatcaatttgcgatttcagtcaatcaatctagtaatcatttttcaacgataactgaagatgttagtcacgcttctaattttagtgttaattcaggcggttcttcaggtggtttctcaggcggcggaggcggcggaggtggtggtgccttctaattttccaaaagtatggtataataaagaaaaatttatggagttattatgttaataattgaattactcaaagccctatttttaggagtcgttgagggagtgacagaatggttacctgtttctagtactggccatttaatcttggttcaagagtttatgaagttgaaccaaagcaaatcctttgttgaaatgtttaatattgttatacaacttggggcaattatggcagttattgtcatttattttaaacgccttaacccatttcagccaggtaaatctgctagagaaattcgtttaacttggcaattatggttaaaagtagtgatagcttgtattccatctattttaattgctttaccatttgataattggtttgaagctcattttaatttcatgatcccgattgcaatagccctaatcttttatggttttgtcttcatatgggttgaaaaacgtaatgcacacctcaaaccacaggtaaccgaattggcaagtatgtcttacaagacagctttcttgattggatgcttccaggttctcagtattgttccgggaaccagtcgttctggagctactattttaggagcaattattattggaactagtcgttcggtcgctgctgactttactttcttccttgccatcccaactatgtttggttatagtggacttaaggcggttaaatactttttagatggtaacgtcttgagtttagaccaatctttaatacttttagtagcaagtctgacagctttcgtagttagtttatatgttattcgtttcttgacagactatgtcaaacgacacgatttcaccatctttggtaagtatcgtatagtcttaggaagtttactcatcctctactggttagttgttcatttattctaaaatataacataaaaagctgagtattcctcagctttttagcgtgttaggctgtgaaaaattgctaaaaaatagctttttcggtataataagaaaactgaatactcgtatgaggtgatgatatggaaatgaaacaaatcagtgaaacaacactgaaaattacaattagtatggaagatttagaagatcgtggtatggagctgaaagatttcctaatccctcaggagaagactgaggaatttttctattctgtcatggatgaattagacttgccagaaaactttaaaaatagtggtatgttaagttttcgagtaacacctaaaaaagatcgcattgatgtttttgttacaaagtctgaattaagtaaagatttaaatttagaagaattagcagatttgggtgacatttcaaaaatgtctccagaagacttttttaaaacattggaacaatcgatgttggaaaaaggggatacggatgcccatgccaaattagcagaaattgaaaatatgatggataaagcaactcaagaagtagttgaggaaaatgtttctgaagaacaacctgaaaaggaagtagaaacgattggatatgttcactatgtctttgattttgataatattgaagctgtagttcgattttcacaaacgattgattttccaatagaagcttctgaactctataaaaatggtaaaggctatcatatgacaattttgctagacttggaaaaccaaccaagctactttgctaatttgatgtatgctcgaatgcttgaacatgctaatgtgggcacaaaaacacgagcttacttgaaagagcatagtattcaattgattcatgatgatgctatttcaaaattacaaatgattgagatgggataaaatgataccttttacaattgagtatatttttgtattgattggagcatttttattatcaatcattctaactcctattattcgagttatatctttgaaggtaggagcggttgataaaccgaacgctcgaagaatcaacaaagtaccaatgccaagtagtggtggtttagcaatatttctctcctttgttgtaacaacattatttttcatgccaatggcggccagtagacactttatagaagtctcttattttcactacattttgcctgtaattattggcggtctcgtagttacaacaacaggattcatagatgacatctttgaattaagacctcgttataaaatgttgggaattattattgcagctattatcatatggaaatttacacattttagatttgatagttttaagattccaataggtggtccactcttggagtttggtcctattttaactttctttttgacagttttatggattatttcaatcactaatgctatcaatctgattgatggtctagatggtctagttagtggtgtttcaattatcagtctagcaacgatggcagtggtttcttatttctttttacctaaaatagatttttttctcacgctaactattgttattttaatcgcctcaatagttggttttttcccttataattatcatccagccattatctacctaggtgatgctggtgccttgtttataggatttatgattggtgtattatcgcttcaaggtttaaaaaactccacagctgttgcagtgataacacctgtcattattttaggagttcctattttggatacagctgttgctattgtgaggcgtaaattatcagggaaaaagatttctgaagctgataagatgcacctgcatcaccgattgctatctatgggatttacacatagaggagcagttttagttgtttatggtattgcaattatcttttcgcttatcgctttgcttttaaatgtttctagtcgtattgggggaatttttcttctattggcgctactattagcgatggaaatttttatagaaggtttaaatatttggggtgagaatcggacaccactatttaatctcttaaagttcattggcaacagtgattacagacaaagtgttattgctaaatatagcgataagcatcaaaaataaaagcctgaaaaggcttttttagttttaatcatttagatagcagtcacacctcatttttgctataattatttagaatataatatcgggtgagtgccctataatatcttctttaaaccatagagaaatatcacatattctctgttaaccaagaaaaggagtgtacaatgtctgtacttgaaatcaaaaatcttcatgtttctattgaagataaagaaattttaaaaggtcttaatttaacgttgaaaacaggagaaattgctgctatcatgggtccaaatggtactgggaagtcgacactttcagcagctattatgggaaatcctaattatgaagttacagcaggtgaaattctttttgatggtgaagatattttagagctagaagtggatgaacgtgctcgtttgggtctatttcttgccatgcaatacccttcagaggttccagggattactaatgctgaatttatccgagcagctatgaatgcgggaaaggctgatgatgataaaatttccatccgccaatttatcactaagttagatgaaaagatggaactacttggcatgaaagaagaaatggcggaacgttatcttaacgaaggtttttcaggtggtgagaagaagcgcaatgaaattttacaactcctaatgttagagcctaagtttgccctcttggatgagattgactctggccttgatattgatgctcttaaagtggtatcaaagggagtcaatgaaatgcgtggtgaaggttttggtgctatgattattacacactatcaacgccttttgaattacattacaccagataaagtacacgttatgatggacgggaaggtagtattgtcaggaggaccagaattagcggttcgccttgagaaagaaggttatgctcaaatcgctgaagagcttggtttagagtataaagaagaagtctaatttgtcacttcaactagaagagaaaaggagttacaaatgtctaaagaagctatattaaattttttacaagccaaaggtgagcctacttggttacaagaattacgactaaaggcttttgaaaaaatagaagaactagaattaccagtaattgaacgtgtaaaatttcatagatggaatttaggtgatggaaccattttagagaatgactatacagctaacgttccagatttcacagagttaggaaacaatcccaagttggttcaaattgggacccaaaccgtccttgaacaagttcctatggaattaatagagaaaggcgttgtctttacagatttctattcggccttggaagaaattccagaagtcatagagcgctactttgggaaagcacgtccttttgaagaagatagacttgctgcctatcacacagcttacttcaacagtggtgcagtgctttatattccagataatgttgaaattactcaaccaatcgaaggtcttttttatcaagatagtcagtctaaagtaccatttaataagcatatccttcttattgttggaaagaatgcaaaagttagttacttagagcgatttgagtcaattggtgatgggacagaacgaacaagtgctaatatttctgtagaagtaattgcccaagcaggtagccaaattaaatttgcttcaattgatcgcctcggagaaaatgtgacaacgtttataagtcgtcgtggtcgtcacagtagcgatgcaacaatagattgggcccttggggtgatgaatgaaggcaatgttgttgctgactttgattctgatttaattggtgatggaagtcacgctaatttaaaagtagttgctgcctcgtcagggcgtcaagttcaaggaattgatacgcgtgttacaaactacggctgtaattcagtaggacatattttacagcatggggttattttagagcgtgggactcttacttttaatggtatcggacatattataaaaggtgcaaagggagcagacgcccaacaagaaagccgagttctcatgttatcagacaaagcacgttcagatgctaatcctatccttttgattgatgaaaatgatgttacagctggtcacgcagcctcaattggtcaggttgacccagaggatttatattatttgatgagccgaggcttgaaccaaaaaacagcagagcaattagttattcgtggatttttaggaacagtcattgctgaaataccagtaaaagaagttcgcgatgaaatgattgccgttattgatacaaaactagaaaaacgttaatatgacattactagatagttataaactaaagcaagatttcccaattttaaatcaattagttaatgatgagccgcttatctatttagataatgcagcaacgacacaaaaaccgaatcaagttttagaagctttgcgagactactaccaaaacgacaatgcaaatgtccatcgtggtgttcatactttagcagaacgagcgactgctcagtacgagaatgctcgtgaaaaagcaaggcagtttttaaatgctaaattaagtaaagaaattttattcacacgtggcaccacaacaggattaaattgggtagctaagtttgccgaaagtattttagaacgaggtgatgaggtacttatttccattatggagcatcattctaatattatcccatggcaacaagcttgcgagagaactggcgctaaattggtttatgcctatctaaaagatggttctttagatttagaagatttctataataaattatcctctaaaactaaatttgttagtttggcacatatctcaaatgtacttggctgtgttacaccagtaaaagcaatagcagaacgtgtacatcaagttggggcatacatggttgttgatggagctcaatcagcgccacatatggcgattgatgttcaagaccttgattgtgatttcttcgccttatctggccataagatgcttggtcctactggtattggtgttctttatgggaaagaaagcattttagataagatgccacctgtcgaatttggtggtgaaatgattgattttgtctatgagcaaagtgcaacatggaaggaattgccctggaagtttgaagctggaacgcctaatattgctggagcgatcgcttttggagaagctttagattatttaacggatgttggtatggatgagattcatcaatatgaacaaagtttagtttcttatgtgttgcctaaattacaggctatcgatggtttaactatttacggacctagtgatgctgaatctcatgtaggcgttattgccttcaatttagaaggtttacacccacatgatgtggcaactgcaatggattacgaaggagtggctgttcgtgcaggtcatcattgtgcacaaccccttattaatcatcttggtatccattcggcggttcgagcaagtttctatttctataataccaaagaggattgcgacaaattggtagacgctatccaaaaaactaaggagtttttcaatggcactctctaaattagataatctctacatggcagtggtagctgatcattcaaaacaccctcatcatcatggatttttagaaggcgttgaacaagtgcagttaaataatcctacatgtggagatgttatttccttatctgttaaatttgatggaaatattatttcagatattgcatttgctggtaatggttgtacaatttctacggcttcatcaagcatgatgacagatgcagttattgggaaaacaaaagaagaagcattgcagcttgctgatgtattctccaaaatggttcaaggcgatcaaaatccaaaacaagagaaacttggggatgcagagtttctagctggggtatcaaaatttccacaacgtatcaaatgtgctacgctttcgtggaatgctttaagaaaggctattgagagagataatcaggcagaactctgacaaccatagttgaaggaattacatttaaacaacttttactgacataaggtagtctagtagaagaatgtcttaaatttaaatattaaagaaaggataagtatgtccgaaataaatgaaaaagtagaaccacagccaatagatcttggggaatataaatttggatttcatgacgatgtaaagccaatttattctacgggaaaaggtctaaatgaggctgttattcgtgagttatctgcagctaagggtgaacctgagtggatgttggactttcgtctaaaatccttggaaacgtttaataaaatgccaatgcagacctggggagcagatttatcagatattgattttgatgatattatttattatcaaaaagcatctgataaacctgcgcgtgattgggatgatgttccagaaaaaatcaaagaaacttttgaaagaattgggattccagaagctgaaagagcttatcttgcaggagcatcagcacaatatgaatcagaagtggtttatcataatatgaaagaagaatatgataagctgggtattgtttttacggatactgactctgcacttaaagagtacccagagctattcaaaaaatattttgctaaacttgtccctccaacagataataaattagctgctctgaactctgctgtatggtcaggtggaacatttatttatgtccctaaaggtgttaaggtggatattccacttcaaacttacttccgtattaataatgaaaatactggacaatttgaacgtactctcattattgtcgatgagggagcaagtgttcactatgttgaaggttgtaccgccccaacttattcttcaaatagtttacatgcagctatagttgaaatttttgcacttgatggagcttatatgcgctatacgactattcaaaattggtccgataatgtctataatttagtgacaaaacgtgctaccgctaaaaaagatgcaacagttgagtggatagatggaaatctaggtgctaaaacaacaatgaaatacccatcggtttaccttgatggtgaaggagcacgtggcacgatgttgtctattgcttttgcaaacaaaggacaacaccaagatacgggtgcaaagatgattcataatgctccccatactagttcatccattgtctctaaatcaattgctaagggtggaggaaaagttgattatcgaggtcaagtgacatttaataaagattccaaaaaatcagtgtcacatatagaatgtgacaccatattgatggatgatatttcaaaatcagataccataccgtttaatgagattcataattcacaggttgctttagagcatgaagcaaaggtgtctaagatttctgaagagcaactgtactacttgatgagtcgaggtttatctgaagctgaggcaacagaaatgattgttatggggtttgttgagccctttacgaaagaattaccaatggaatatgcggtagagttaaaccgcttaatttcctatgaaatggaaggttcagttggttaattgaagatttcaagagataataaaaagcccctatgttattgatgaagggggcttttatattagcacagttattatctagagcgctttataagtaatactatcccagctaaaagacaaaggatagcgatggtgcccagaacaattaaaatagatacaaaatgtgattgaataaattgatctgtttttgtccaccactgttcttttgtttgaggctgttcttgaatagatttggttttggttttagtaacttcttttttaggtttaacggcttttaatacaggagttttagaagaaatatttttagcgtctttaaaacctttttctacaagagcgttgacaaacggatgacgatagtactctccgtcttggtctgaccaatcaccaactcctaaaaccacagttatcaagcgagtattctggcgtttagctgtaactaaggcattaaaagcagcgctagggctagaaccagtttttaagccatctactccttctaatccaaatttagcgccgggggtagagtagttataagttgtaaatgtttcttcataaggagttccgaccatggccttgacttcaggatattttgtatagttcagtatatcagggtattttttaaggaaatgataggttaaaattgatagatcacgtgcagtcgtaacgttagtagcattgttatcgtattcttttggggagtaaagtccattaaaagcactcgctaccgccccactggggttataaaagtgagtttttgtcataccgagtttcttggcggtttcattgattcgtttaatgaaggcgtcaggattgttttgtgataagtggttagcaatcataatagttgctacattagatgacgggacagctgtcatagtaatcagttcacgaataggataagcaaccccagcatgaatattattattactaatttcataaatcttacttatggcttggtctgtttctgttgcagtcactgtggtgttgaggcttgtttttcctttagctaagtcttcaaatagtaaatataaagtaaacattttagacatgctagcgggatcacgttctaaatcagcgttatcttcccacaaaatatgacctttattgtcaataacgatagacgctttaggtttattaatatctttaacatcatatccggcttctcgggtaatttgcataatatctttatgttcttcagcttgcacagagtttacacaagtcagggataataaaatgcagaggaaagatacgattaatttaggcataggtaactcctgaaaactttttattaatattataacaaaaaatcactaataaaaaagacatttcattagtgatttttaattttatatattctcctaaacctagctaaagaaactgctgtgcagcaactccttgtgtcaaagggagattactattaaagtttttcgttaacgtagcgcacaaaatgattccaccacactttgaggaagaaactgcgctcaatactatcttttgccactaaatgaacgctaggttcctttatgagatagccttttccaaccttattaaggtcaacgtaataagctttccctaggttctctttttttgtaataggagcagtaagctcttttttaaagttaatttttaactgattttgtttagtgatatttttcttctgtactactttcaaatcgtttttagcaacagcgatgaccgattgttcttttccgtctctcacacttgcttctttacctttatatgcagctcctttagctaatacaaggttaggttcgtaggtgtttgtgatatagttcaagagagagttagttgctgtaaagcgagcatatttgtctttatcggccttatcagcatgcataataacagtgagtagtctcattccactttcagtagatgtagcaataaaagattggccagctaattccgttgtcccagttttcaaacctgtaatacctggtctaaagacaggcatatctggtagcatgtagttataagaatgcataatatctttatcaaatttagcaacggacttactagtaatcttaagaatggaaggatattcgttgaccaaatggtaggcaacaatagcaatatcacgtgcactcattttattttcgtcgttttgtgacgattttggataaatgtgattgcctaacatactattatttaagccagaagcattgactaggtggctatcatgaattccccacttttccaattgagcagtcattttatcaacaaatttactttcggttcctgaaatatgttcagccaaagcaatggctgcactgttagcactagaaatcatggcagcgtccacgagctgtttaacagtatagcgccttttttctaaaggaacattactagcatcagattcgcgtgttagttgataagggtagtcagatatatttactttggtattccacttgaggttaccgttatcaatttctttatagaccatataaacggtcattattttagtcaaggaagcaatagcagcgggtttgttagcatctttttcatacaagatttttcctgaatctaaatcaactgccaaggcatgtttagcggaagcattaaaagattcagcagagatggttggcataaaaaaaatgcaactaagtaatagaatagaagtaataatttttttcaaaataacacctttagaaattttttaaactttgtccatcctattatatcatatcactatatcatactaggaattattatttttgataattaaataaagaaaacgtttgttataaaaatgtaaaaaaatgtaaaaaaatgaaagttaaaaaattatctgaaaattttgcgtttttgtcttttcttaagaattttttgtggtataatgttagtcactagataaatgaattaggagaacaaagctatggcaaaacagaaaaataactggcgccgtgttggagttggtgtccttacacttgcttcagttgcgactcttgctgcatgtggaagtaaatcagcttcccaggattctaatggagcgattaattgggctattccaacagaaatcaatacactagatttatctaaagtcacagacacttactcaaatctagctattggtaactctagtagtaatttccttcgcttagataaagatggaaagacaagaccagatttggctactaaagtagatgtttcaaaagatggcttaacttatacagctacattacgtaaaggcttgaagtggtcagatggcagtaaacttactgcaaaggattttgtttattcatggcaacgtttagttgatcctaaaacagcttcacaatatgcttaccttgctgttgaagggcatgtgcttaatgccgataaaatcaacgaaggacaagagaaagacttgaataagctaggtgttaaggcggaaggcgatgacaaagttgttattactttatctagtccgtctccacaatttatctactaccttgcattcactaacttcatgccacaaaaacaagaagttgttgaaaaatatggaaaagattacgcaactacttcaaaaaatacagtttactcaggaccatatactgttgaaggttggaatggttcgaatggtactttcacgctgaagaaaaacaaaaattattgggacgctaaaaatgtaaaaacaaaagaagttcgcatccagactgttaaaaaaccagataccgccgttcaaatgtataaacgtggtgagttagatgcagctaatatctcaaatacttctgctatttatcaagctaataagaataataaagatgtcacagatgttctagaagcgaccactgcctatatggaatataatactactggttctgtgaaagggcttgataatgttaagattcgtcgcgccttaaacttagcaactaaccgtaaaggagttgttcaagcagccgttgatacaggctcaaaaccggcaattgcttttgcacctactggtttagccaaaacaccagatggaactgatttggcaaaatatgttgccccaggttatgaatataataaaactgaagcagcaaaactctttaaagaaggtttggctgaatcaggcttgactaagctaaaattaacaattacagcagatgctgatgctcctgctgccaaaaactctgttgactatatcaagtctacttgggaagctgctcttccaggacttactgttgaagaaaaatttgtaacctttaaacaacgcttagaagacagtagaaaacaaaactttgacatcgtagtttctctttggggtggggattatccagaaggatcaactttctacggcctctttaagtcagattcacaaaataacgatggaaaatttgctaacaaggactatgatgctgcttataacaaggcaatttctgaagatgcgatgaaaccagcagaatcagcgaaggactataaagaagcagagaaaattttatttgagcaaggtgcttataacccactctacttccgtagtggtaaaggtttacaaaatccaaaattaaaaggtgttattcgtaatactacaggtttgtcaatagactttacacatgcttataaaaaataattaaattactttacactaaacctttgcaagaattggtaattgccagttcttgcttttggttaagtaaagaaagtgaaagagtttgctatttttagcaattctaagaaaaggaaatgatatgattaaatatattttaaagcgtgttgctattttgttagtaacgctatgggttgtcataaccctatcgttctttctgatgcagatccttccaggaacaccctacaataatccaaaactcactgaagaaatgatcgcattgcttaataaacagtatggtttagacaagcctgtatggcaacaatatttgacttacctttggaatgtacttcatggtgactttggaacgagttatcaatcagtgaatcagccagtatcacgtatgattagcttgagattaggagtttcagtacatctaggtgttcaggctctcgtatttggtgttttaggcggtattttggtaggagctatttcggcacgtcataagaatgataaagtcgatggtatcttaagtgttattgcaacgctagggatttctatgccttcatttatcattggtatcttattattagactattttggatttaagtggaacttgttgcctttatcaggttgggggactttctctcaaaccattttaccttctttagctctaggactccctacattagcatctgtttcacgcttcttccgtagtgaaatgattgaaactttaaattctgattatgtgcaactagctcgttcaaaaggtatgacaattcgtcaagtaactcgaaaacatgcttaccgtaattctatgattccaattttaactctaattggccctttggcggcgggtctgttaactggttctgcactaattgagcagattttctcgattccaggaattgggcagcagtttgttacttcgattccaacaaaagactatcctgttattatggggacaaccattgtttatgcagtaatgttgatggttgctatcttgataacagacgttgttattagtatcgtagacccacgtgttcgcttgcagtaaggagatgttatggcagataaaaacagaacatttaaacttgtaggtgcaggatcttctagcacacaagaaaaaattgaaaagcctgctctttcgtttatgcaagatgcgtggcgtcgcttgaaaaaaaacaaattagcagtagtttcactctatttattagctcttttacttactttttcgttagcctcaaatttatttgtaactcagaaggatgctaatgggtttgattcgaaaaaagtaactacatatcgcaacttaccacctaaattgagttcaaaccttcctttttggaatggtagcattaagtacgctggaaatacagaatctacagacgcttataagtctcaaaatgtccctgaaaaagttaagtatgctttaggtacagattctctagggagaagtgttgctaagcgcatcatcgtaggtattcggatttccttacttgtagctattgcagctacattcattgatttaattatcggtgttacatacggtcttgtttcaggttttgctggaggacgccttgatacattaatgcaacgtatcgtagaggtaatttcatcaattccaaacttagttatcgttacaatgttaggtttggtccttggtaacggtattacggctattattatctctattgcttttaccggatggacttctatgtctcgtcaggtaaggaatttaaccctatcatatcgagaaagagagtttgtgcttgctgcacgttcacttggggaaagtccaattaaaatagccttcaaacatattttacctaacatttctggtattatcattgtacaaattatgatgacaatcccaagtgctattatgtatgaagcggtactttcagcaatcaatttaggtgttaaaccaccgacagcttcattaggatcattgatttcagatgcacaagaaaatttacaatattatccatatcaagttatcttgccagctttagcattggtaatgatttcattggcatttattttgcttggtgatgggttgcgagatgcttttgatccaaaatctagcgatgaataaggaggtataatcatggaaaaagaaactattttaagtgttaataatcttcatgttgacttccacacatatgctggagaagtaaaagcaattcgtgatgtcaactttgaattaaaaaaaggtgagactcttgcaatcgttggtgaatctggttcaggaaaatctgtaactaccagaactttaattggtttaaatgctaaaaattcagagatatcagggaatgttcaatttaaggggcgtaaccttgttgaactatcagaagaagagtggactaaggtacgcgggaatgagatttctatgattttccaagaccctatgactagtttggatccaacgatgaaaattggcatgcaaatagcagaaccaatgatgattcatcaaaaaatttcaaaaaaggatgctttaaaattagctcttgagctaatgaaagatgtaggtatcccaaatgctgaagagcatattaatgattacccacatcagtggtctggaggaatgcgccaacgtgcggttatagcgattgctttagctgctgatcctgaaattcttattgctgatgaaccaacgactgctttagatgtaacaattcaagcacaaattttgaacttaatgaaaaaaattcaagcagaacgagactcctccattgttttcataactcatgacttaggggtcgttgcagggatggcagaccgtgtagcagttatgtatgcagggaaaattgttgaatttggaactgttgatgaagtcttttataatccacaacatccatatacttggggattattgaattcaatgccgacaaccgacacagaatcaggtagtttagagtcaattccgggaacaccaccagatttgttgaacccacctaaaggagatgcatttgcagctcgtaatgaatttgcattagatattgatcatgaagaagaaccaccgtacttcaaagtttcagaaacacatttcgctgctacatggcttttagatgaaagatcacctaaggtgcttcctccattaccgatccaaaaacgttgggaaaaatggaacgagattgaagggaggaaagcctaatgactgaaaatcgaaaaaaattagttgaagtcaaaaatgtttctttgaccttcaataaaggaaaagctaatgaagtgagagcaattgataatgttagttttgacatttatgaaggtgaagtgtttggattagttggggaatctggatcaggaaagacaaccgttggacgttcaattttaaaactttatgatatttctgatggagaaattacctttaatggagaagtgatctcacatctgaaaggtaaagcattacatagttttcgtaaagacgctcagatgatttttcaggatcctcaggctagcttaaacggccgtatgaagattcgtgatatcgtagcagaaggtttagatatacataaattagctaaatcaaaatcagatcgtgatagtaaagttcaggccctattagatcttgtagggttaaataaagatcatttaacacgttatccgcatgaattttcaggtggacaacgacaacgtatcgggattgcacgtgctttagcagtagagcctaaatttatcattgctgatgaaccaatatctgccttagatgtttcaatccaagcacaagttgttaatttaatgcaaaaattgcaaagagaacaaggattgacttatttgtttatcgcacatgatttgtctatggtaaaatacatttcagatcgtatcggtgttatgcattgggggaaactgttagaagttggaacatctgatgatgtttataacaatccaatccacccttatacgaagagtctattatcagctattccagaaccagatccggagagtgaacgtcaacgtgttcaccagccgtataatccagctattgagcaagacggacaagaacgtcaaatgcacgagattacccctggtcattttgttttatctacaccccaagaagctgaagaatataaaaaacaaatattataaaagatggctagcccatcttttatttttttactaataaaataaatttaggtatggaattttaaactctatgttattggtgttagccaacaggaaacttttttcagaaaatgtagaaaaagtatgaaaaaagagttgacaaagtaagagatgatgtagtaaactaaataagttgtctcgagagagcagtttctattagcgcgtagttaacaacttaaaaaaagtagttgacaaagcagaataagtttgctagaatatagaagttgtctcaagagaggcaaagacctttgaaaactgaacaagacgaacgaatgtgcagggtggatttacattgtaaatccgtcaatgacaaaaaacaataaatctgtcagcgagacagaaaagagcaaagctcaaacttttaatgagagtttgatcctggctcaggacgaacgctggcggcgtgcctaatacatgcaagtagaacgctgaggtttggtgtttacactagactgatgagttgcgaacgggtgagtaacgcgtaggtaacctgcctcatagcgggggataactattggaaacgatagctaataccgcataagagtaattaacacatgttagttatttaaaaggagcaattgcttcactgtgagatggacctgcgttgtattagctagttggtgaggtaaaggctcaccaaggcgacgatacatagccgacctgagagggtgatcggccacactgggactgagacacggcccagactcctacgggaggcagcagtagggaatcttcggcaatggacggaagtctgaccgagcaacgccgcgtgagtgaagaaggttttcggatcgtaaagctctgttgttagagaagaacgttggtaggagtggaaaatctaccaagtgacggtaactaaccagaaagggacggctaactacgtgccagcagccgcggtaatacgtaggtcccgagcgttgtccggatttattgggcgtaaagcgagcgcaggcggttctttaagtctgaagttaaaggcagtggcttaaccattgtacgctttggaaactggaggacttgagtgcagaaggggagagtggaattccatgtgtagcggtgaaatgcgtagatatatggaggaacaccggtggcgaaagcggctctctggtctgtaactgacgctgaggctcgaaagcgtggggagcaaacaggattagataccctggtagtccacgccgtaaacgatgagtgctaggtgttaggccctttccggggcttagtgccgcagctaacgcattaagcactccgcctggggagtacgaccgcaaggttgaaactcaaaggaattgacgggggcccgcacaagcggtggagcatgtggtttaattcgaagcaacgcgaagaaccttaccaggtcttgacatccttctgaccggcctagagataggctttctcttcggagcagaagtgacaggtggtgcatggttgtcgtcagctcgtgtcgtgagatgttgggttaagtcccgcaacgagcgcaacccctattgttagttgccatcattaagttgggcactctagcgagactgccggtaataaaccggaggaaggtggggatgacgtcaaatcatcatgccccttatgacctgggctacacacgtgctacaatggttggtacaacgagtcgcaagccggtgacggcaagctaatctcttaaagccaatctcagttcggattgtaggctgcaactcgcctacatgaagtcggaatcgctagtaatcgcggatcagcacgccgcggtgaatacgttcccgggccttgtacacaccgcccgtcacaccacgagagtttgtaacacccgaagtcggtgaggtaaccttttaggagccagccgcctaaggtgggatagatgattggggtgaagtcgtaacaaggtagccgtatcggaaggtgcggctggatcacctcctttctaaggataaggaaacctgccatttgcgtcttgtttagttttgagaggtcttgtggggccttagctcagctgggagagcgcctgctttgcacgcaggaggtcagcggttcgatcccgctaggctccattgaatcgaaaggttcaaattgttcattgaaaattgaatatctatatcaaattccacgatctagaaatagattgtagaaagtaacaagaaaataaaccgaaaacgctgtgaatatttaatgagttttctagttttaaagaaactaggttaataaggttaagttaataagggcgcacggtggatgccttggcactagaagccgaagaaggacgtgactaacgacgaaatgctttggggagctgtaagtaagcgctgatccagagatgtccgaatgggggaacccactagttaatgactagtatccatatctgttaaggatatgagaaggaagacgcagtgaactgaaacatctaagtagctgcaggaagagaaagcaaaagcgattgccttagtagcggcgagcgaaacggcaggagggcaaaccgaagtgtttacacttcggggttgtaggactgcgatataggattaatcattatagaagaattacctgggaaggtaagccaaagagagtaacagcctcgtatttaaaatgatagattaaccttagcagtatcctgagtacggcgagacacgcgaaatctcgtcggaatctgggaggaccatctcccaaccctaaatactctctagtgaccgatagtgaaccagtaccgtgagggaaaggtgaaaagcaccccgggaggggagtgaaatagaacctgaaaccgtgtgcctacaacaagttcgagcccgttaatgggtgagagcgtgccttttgtagaatgaaccggcgagttacgatatgatgcgaggttaagttgaagagacggagccgtagggaaaccgagtcttaatagggcgtcatagtatcatgttgtagacccgaaaccatgtgacctacccatgagcaggttgaaggtgaggtaaaactcactggaggaccgaaccagggcacgttgaaaagtgcttggatgacttgtgggtagcggagaaattccaaacgaacttggagatagctggttctctccgaaatagctttagggctagcgtcgatgttaagtctcttggaggtagagcactgtttgggtgaggggtccatcccggattaccaatctcagataaactccgaatgccaacgagatataatcggcagtcagactgcgagtgctaagatccgtagtcgaaagggaaacagcccagaccaccagctaaggtcccaaaatatatgttaagtggaaaaggatgtggggttgcacagacaactaggatgttagcttagaagcagctattcattcaaagagtgcgtaatagctcactagtcgagtgaccctgcgccgaaaatgtaccggggctaaaacatattaccgaagctgtggatgacacaaaagtgtcatggtaggagagcgttctatgtgtgaagaaggtgtaccgtgaggagcgctggaacgcatagaagtgagaatgccggtatgagtagcgcaagacaggtgagaatcctgtccaccgtaagactaaggtttccaggggaaggctcgtccgccctgggttagtcgggacctaaggagagaccgaaaggtgtatccgatggacaacaggttgatattcctgtactagagtatatagtgatggagggacgcagtaggctaactaaaccagacgattggaagtgtctggtcaaacagtgaggtgtgatatgagtcaaatgcttatatctttaacattgagctgtgacgaggagcgaagtttagtagcgaagttagtgatgtcacactgccaagaaaagcttctagcgatacatatactctacccgtaccgcaaaccgacacaggtagtcgaggcgagtagcctcaggtgagcgagagaactctcgttaaggaactcggcaaaatggccccgtaacttcgggagaaggggcgctgattttagatcagccgcagtgaataggcccaagcaactgtttatcaaaaacacagctctctgctaaatcgtaagatgatgtatagggggtgacgcctgcccggtgctggaaggttaagaggagtgcttagcgtaagcgaaggtatgaattgaagccccagtaaacggcggccgtaactataacggtcctaaggtagcgaaattccttgtcgggtaagttccgacccgcacgaaaggcgtaatgatttgggcactgtctcaacgagagactcggtgaaattttagtacctgtgaagatgcaggttacccgcgacaggacggaaagaccccatggagctttactgcagtttgatattgagtatctgtaccacatgtacaggataggtaggagcctatgataacgggacgccagtttcgtttgaggcgttgttgggatactacccttgtgttatggctactctaacccagataggcaatccctatcggagacagtgtctgacgggcagtttgactggggcggtcgcctcctaaaaggtaacggaggcgcccaaaggttccctcagactggttggaaatcagtcgtagagtgtaaaggtataagggagcttgactgcgagagctacaactcgagcagggacgaaagtcgggcttagtgatccggtggttccgtatggaagggccatcgctcaacggataaaagctaccctggggataacaggcttatctcccccaagagttcacatcgacggggaggtttggcacctcgatgtcggctcgtcgcatcctggggctgtagtcggtcccaagggttgggctgttcgcccattaaagcggcacgcgagctgggttcagaacgtcgtgagacagttcggtccctatccgtcgcgggcgtaggaaatttgagaggatctgctcctagtacgagaggaccagagtggacttaccgctggtgtaccagttgtcttgccaaaggcatcgctgggtagctatgtagggaagggataagcgctgaaagcatctaagtgcgaagcccacctcaagatgagatttcccatgattttatatcagtaagagccctgagagatgatcaggtagataggttaggagtgtaattgtggtgacacatttagcggactaatactaatagctcgaggacttatccaaaaagagatattgacaacgttacggtttcttgttagactatagatattcaattttgagtgaataaggctcaatagttaagtgataattgcctaggagatacacctgttctcatgccgaacacagaagttaagccctagaacgccggaagtagttgggggttgccccctgtgagataaggtagtcgcttagctataatccgccatagctcagttggtagtagcgcatgactgttaatcatgatgtcgtaggttcgagtcctactggcggagtagataaagggagactaactttggttagcctttttttattggaattattatccttaagattggctagcatcttaattgtccgaatttgtcatttgttatgttataatatggatattctatattttattagggaggttttatgaaaatttttgagaaagctcctgccaaacttaatttaggattagatattaaaggacgatgtgacgatggttatcatgaattagctatgattatggttagtattgatcttaatgactacgttaccatttctgagctaaaggaagattgtattgttatcgattctgatagtagcaaaatgcctttaaataatgataatgatgtgtttaaagctgcagatataatcaaaaatcaatatggtattaataaaggtgttcatattagattagaaaaatccattcctgtctgtgcaggactggggggtggttctactgatgctgctgctacaataagagctcttaatcgattatggaatcttcaaatggactatgacgaaatggttgctattggttttaaaattggtagtgatgttccttattgtcttggtgggggatgttcgttagtattaggtaaaggtgaaattgttaaacccttaccgacattgagaccatgttggatagttctggttaagccggattttggtatttcaactaaatccatttttagagatattgattgtaagtctataagtagagttgatattgatttattaaagtctgctattttgtcatcagattatcagttaatggtcaaatctatgggaaattcactcgaggatattacaattactaaaaatccagttataagtacaataaaagaacgtatgttaaattctggagccgatgttgcattaatgacaggaagtggaccaactgttttttcaatgtgttctacagagaaaaaagctgatcgtgtttttaatagtatgaaaggtttttgcaaagaagtttataaagttaggttgttgagataaaaggttttatcttcttcacctatctatgattgattcttctatatcttcgtgatataatttactggttaacaaaaaagaggtatatatgacagttttagaacaaaaattagaccatttagtgagtcaaatcttgcttaaagcagaaaatcaacatgaattattgtttggtacttgtcaaagtgatgttaaattgactaatacgcaagaacacattctgatgcttttatcacaagagcagttgacaaattctgatttagctaagaagttaaatattagtcaggcagctgtaactaaagcagtaaaaagtttaatttctcaggatatgttgaaagcgaataaagattctaaagatgctcgtattacttattttgagttatctgaacttgctaaacccattgcagatgaacacacacatcatcatgacaatacgttaggggtttacggaagattagtaaatcatttttcaaaggacgaaaaggtcgttttagaacgttttcttgatcttttctctagagaattagaagggtaatcatgcgatatattacagttagtggtcttacttttcagtacgatagcgatcctgtgctggaaggggttaattaccatttagacagtggggagtttgttaccttaacaggtgaaaatggggctgctaaatcaactttaataaaggctactttaggtattttaacgcccaaagtgggtacagttaatatctctaaagaaaacaaagaaggaaaaaaattacgtattgcctatttacctcaacagattgcaagttttaacgctggctttccatcgtcagtttatgaatttgtgaaatctggacgataccctagaaatggttggtttagaagactgactaaacatgatgaagaacatattagggttagtttagaagctgttggtatgtgggataatcgccataaaaagataggaagtttatctggcggtcaaaagcagagggctgtcattgctaggatgtttgcttctgatccagatatttttgtattggatgagccaacaactggtatggacgcagggactactgagaaattttatgagttaatgcatcataatgctcataagcatggtaagtctgttttgatgattactcacgatcctgatgaagtaaaggggtatgctgaccgaaatattcatcttgttaggaaccaatctttaccatggcgttgtttcaatgtccatacaaacgaaatggaggttgaatcagatgctacttgatatgctttcctatgattttatgcaacgagcgctcttagcagttgtggctattagtatttttgctccaattttaggcatcttcctaattttacgtcgtcagagtttgatgagtgatactttgagtcacgtttccttagccggtgttgcattaggcgttgttttaggtatctcgcctacatggtcaactattttcgttgttactttggcggcagttgtattagagtatttgcgtactgtatacaaacattatatggaaatatcaactgctatcctgatgtcgatggggttggctatatctttaatcgttatgagtaaagctcataatgttggtaatgtcagtcttgaacagtatttatttggttctattattactattgggaaggaacaagtgattgctttgtttgttattgcattaatcacttttattttaaccatcctatttattagaccaatgtatatattaacgtttgatgaggatacagcttttgtagatggattgcctgtgcgtacaatgtctattttgttcaatgttgttacaggtattgctattgcattaacaattcctgccgcaggtgctctattggtgtcaactattatggttttaccagctagtattgctatgcggttaggtcgaaattttaaaactgttatttttctgggtatgttaattggatttgtgggaatggtagctggtattttcctttcgtattattgggagacacctgctagtgcaacaataacgatgatttttattggcattttcctattagttagcttagtaggcttgcttcgcaaacgttaaataaaaaaatctatcttattctaggatagattttttatttatctccctgtttttttcgaatatattttatgagggatcagttgagaaattatctcgatgaggtatctactaagttttctggcttaagttgatagaaggggcaatgtgaatctatttttgcgttttaggataaaaaatactaccggcaattttgccggcagtaaattgtaattattgtgcttcagtagtgctgtgatgtttgtgttgatttaacgcttcttgttcagtcatttgaacgatattagcggtatttgcattttttatgttttctaaactataccaataagtatttgaacgacccttatttgcaacgtagacgattctattttggggagctacattatttgtatctgattcagaagtattagtgttagtattttcttctatatcagatgcactttcaatagctgcttcgttttcatcagcatcgctatttggatcttcaccttcttctgcctgtttcccatcttctttgattagcataccagttttgtaatcaatttttgcgagtggagacgtattttctaatgtaacagttgtgacgccgtattcatcaacttgttctttgccgccgcctaatttgatttctagaagttttccttgtttatcaattccaacatactgaagttcaactcggctaggtactaaattatttccttcgtatattggagtcactttgtaatcaagctagaaatttttatgatttgccaaccaactatctaatctattttcgtagtataacataccatcaggattattttcgctaaatcctgtatttagatatttggtcatagtaactaggttctcaggaacattgttcattcctgaaaattgataaccaacgaggtgacctcggtctataagccaagttgttttacccttttcagtagtaaatttgtagttgtgccaaccggttggattatacgtcagtctttctctttttatcttaggctcatctgcatcccttaattgtatgtgagaatatgttgctctttctaagttatctaatgaacctaccttgatttgcttattatgagtaaacggtaagatttttttgaagaagtacttacatactgtgtctcaacatgggatgtcgtcttataatgtttagccttagcttcaacattctgttgtaatgccccaacgcatagtacgacagttaatagtggtagtgatttgtataattgtttagataatttcataaacctaaacccttctaaatgatatttgtgaaggcctttcacaagtataattttatcattttattgggaaaaagtaataaaaaaacataactagttaattttttttggagattatgttatttaactagatagttattaaagttaaatgttatagatatactgttattacataataatttttatatgatttgttattttattagattttttaatggattatttctttagctgattttgattacaaagttaaggtattctaatcatattttcttgatttataacatgtaaaggttagaataaattcgttggtgttagacagacgatatttgttgtttttatgaaaaaattgtgggtattagatatgtatattttttcgataactatttactctatggtaaaaattctaagctgtttgtttggtgttatttcttaataaaaataaggtagtcatgtataataactataatttaaaagttgtctcttcaggaatgttgttcattaataaaaagtgtagtcaattgactacactttttattgtcttgaaatattattatcagagtatcgattacacttcaagtctatttaaagtttaatacaaagtattttttctttccacgacgaatgactgtaatttcattttcaagcttatcattttctgagatagtatattctaaatcttgaatacgatctccattaatataaatagctccattggagacatcttctcgagcttgacgtttagaattgacaactcctgaagtgactagaaggtctatgatattgaggttatcttccgtctgaacgtgataatttggtactccacgtaaaccttgtttgagctctttaacagacaatccttttatattgccagcaaatagctgttccgtgatattaacggcctccttataagctttttcaccatgaacaagagttacaacttcacgtgctagtgttttttgtgctaagcgttggtgaggtgcttcctcgaattgaatacgtatatcttctatttctttaaggcttaggaatgtaaaaatcttaaggaagcgaacggcatcagcatccataacattgagccaaaattggtacatttcataaggagaggttttgtcagcatcaagccaaacagcatttccttcagattttccgaatttttttcctgtagaatctgttatcaatggaacagtcataacatgagatacaccatttgattttcgtctaataagttcggttccagcagtcatgttgccccattggtcagaaccaccaatttgcaaagtgacattatagttcttatttaattcgtaaaagtcatatccttgcataatttgataagcaaattcagtataggaaatccctgtttcgatacgttttttaacagattctttactcatcatataattgacagtaaaatatttaccaacatctcgtaagaaatcaatgaaactaatattgctgaaccaatcataattatttaccaatacagctttgttatcacctgtttcaaactctagaaaattagataattgaccgcggattttattaccccaactaactacagttttctttgtttgtaaactgcgctcaacatctttaaatgaagggtccccaataagtccagttgcgcctcccacaagtgcataaggcttgtgaccagcaagttgtaagcgacgagaggttaaaatagcaactaaatgtccaagatgaaggctgtcagccgtaggatcgtagccagtatagtaagagacagaaccttcttcaagagctttgcgtaaagcatcttcgtcagttgtctgaaaaacgagtccacgttctttgagttcatcaaaaatattcatctttttctcctaattattaacttgttgtgtattaatgtcaactatatcaaaactctttaggatatgcaagttatattaaatctgatataatgtaggatgaggtattattcatgtttaaaggtaataagaagttgaatagttctaaattaggtgattacacaccacttgaatttggttctatttttttaagaattgtaaagcttttatcagatttcatctatgttattattttactatttgttatgctcggagtaggacttgcagtagggtatcttgctagtcaagttgactctgttaaagtaccaagtaaaaatagtttagtgacacaagttaatacacttactagggtgtctaggttaacttattctgataaatcacaaatttcagagattgccactgatttacaacgtacaccagtggcaaaggatgctatatctgataatattaaaaaggctatcattgcaacagaggacgaaaatttcaatgaccataaaggtgtagttcccaaagccgtactacgtgctgcagcgggatctgttctggggtttggagagagtagcggtggttcaacgctgacacaacaattattaaagcagcaaattttgggagatgatccgtcatttaaacgcaaatcaaaagaaattatttatgctctagcattagagcgttacatggataaggattcgattttatcagattatttaaatgtatcaccgtttggtcgcaataacaaaggacagaatattgcaggtattgaagaagcagcacaagggatttttggagtttccgcaaaagatttaacaattcctcaggcagctttccttgcaggtttaccgcaaagtcctattgtatattctccttatactgcagatgcccagttgaaatcagataaagatcttagttttggtataaagcgccaaaaaaatgtgttatacaatatgtatagaacgagagctttaaccaaagatgagtacaaatcctacaaagattatgacatcaaaaaagattttatcaaacctgcagtggcgacaacaaatcatcatgattatctttactactcggcattatctgaagctcaaaaagtgatgtacaattacctcattaaaaaggataatgtttcagagcatgatttaaaaaatgatgagactagagcgacgtacagacaccgcgctattgaagagattcaacagggagggtatactattaaaactactatcaataaatctgtttatcaagccatgcaggatgctgcagctcaatacggagggttgttagatgatggtactggcaaggttcaaatgggaaatgtactaacggacaattctagtggtgctattataggatttattggtggtcgtaactatagtgagaatcaaaataaccatgcttttgatacggcacgctctccagggtcaagtattaaaccgatattaccttacggaattgctattgatcaagggatgttaggaagtggtagtgttctttcaaattatccaacgacatattcaagtggcgaaaagattatgcatgcggatgaagaaggtactgctatggttaaccttcaagagtcattggacatttcttggaacattccagctttctggacttacaagatgctacgagatcgaggcgttgatgtaaaaaactatatggagaaattagactatccaattgaaaactttggtatagaaagtttaccacttggtggtggtattgatacgtcagttgctcagcaaacaaacctttatcaaatgattgcaaatggtggtgtttatcataagcagtatatgatagaaagtatagaggatagtaatgggaaagtgatttataatcacgaaagtaaacctgtccgtgtcttttcgaaagcaacagctactatcttacagcagctattacatggaccaattaactccggaaagactacaacctttaaaaatcgcttacaaggtttaaatagtggtttagctggggtagattggattggaaaaacgggtactactaactcaacttctgatgtttggttgatgctttctacacctaaagtgactttaggtggatgggcaggacatgataataatgcctctttagcgaaattgacaggttacaataataatgctaattatatggctcacttggttaatgctattaataatgcagatggcaatacttttggtaagtcagaaaggtttagacttgatgatagcgttataaaagctaaagttcttaagtctacaggtttacagccaggtgtagtaacagtaaacggtcgtcgaatcactgttggaggtgaaagcacaacaagttattgggcaaaaaatggacctggaacgatgacctatcgttttgctattgggggaactgatagtgattatcaaaaagcttggtctactttgggtggaaaacgataacaggtttacgatactgatagttttatttgaggagaatagagtgatctgttctccttttattttttccaagataatatgatttaattcttgtatagtcttctttcaaagaattagaaaaacaccagtatgctatgtttaaaaatcatcgtgttatgctaaaactcaagggtgttgatgaacaaattgaaattctagaagcttccttgaagtcaagagaataaaacttgatttattggtgaaaataagttataatgtacgtaactatttgtcgtctgtctaggttgaaatattgtccgacctagatatacagcagttaaatcaacttgataaagtgagatttagctgctctttttgtgcctaattttaagaaaaaaggttattgtaatatatatttaaactttctgaaaattaccacaaacgacatctataagcttgttcttgttaggcgagcaaatgaaataaactcactaagttttatgagataaaaacttagtcactctatctttaaaaaggagctaaaaacttggcaggacatgaagttcagtacggaaaacaccgtacacgtcgtagcttttcaagaattaaggaagttcttgatttaccaaacttaattgaaattcaaactgattcattccaagattttcttgatgctggcttgaaagaagtatttgaggatgtacttccaatttcaaactttacagatactatggatcttgaatttgttggttatgaattaaaagaacctaaatatactttggaagaagctcgtatccatgatgctagctactcagcacctatttttgttactttccgtttagttaataaagaaactggtgaaattaaaactcaagaagttttctttggtgattttccaattatgactgaaatgggtactttcatcatcaatggtggtgaacgtatcattgtttcacaattagtccgttctcctggtgtttactttaatgataaggtagataaaaatggaaaagttggttatgggtcaactgttatccctaaccgtggagcttggttggaacttgagacagacgcaaaagatattgcttatacacgtatcgaccgcacacgtaaaattccatttacaacactagtccgtgcacttggtttctctggagacgatgaaattgttgacatctttggtgacagtgaacttgttcgcaatactattgaaaaagacattcataaaaatccaagtgattctcgtacagatgaagcacttaaagaaatctatgaacgtcttcgtccaggtgaaccaaaaactgcagacagctcacgtagtcttttagttgcacgtttctttgatccacgtcgttatgacttagcggctgttggtcgttataagattaataaaaaactgaatcttaaaacacgcctattgaaccaaacaatcgctgaaaatttagttgatggtgaaacaggagagattcttgttgaagctggaaccgttatgacacgagatgtcattgattcaattgcagagcatatcgatggagacttaaacaagtttgtctacacaccaaatgattatgctgtagttactgaaccagttattcttcaaaaattcaaagttgttgctccaactgatccagaccgtgttgttactattgttggaaactcaaatcctgaagataaagttcgtgccttaactcctgcagatattttagcagagatgtcatacttcttaaaccttgcagagggtatcggtaaggtagatgacattgaccatttaggtaaccgtcgtattcgtgcagttggtgaattacttgcgaaccaattccgtatcggacttgctcgtatggaacgcaatgtccgcgaacgtatgtctgtacaagacaatgaagtcttgacacctcaacaaatcattaacattcgtccagtgactgccgccgttaaagaattctttggttcatcacagctgtcacaattcatggaccaacacaaccctctatcagaattgtcgcacaaacgccgtctctctgccttaggacctggtggtttgacacgtgaccgtgctggatatgaagttcgtgacgtgcactatacccactatgggcgcatgtgtccgattgaaacacctgaaggtccaaacattggtttgattaataacttatcttcatttggacacctcaataaatatggatttattcaaacaccatatcgtaaagtagatcgttctactggtgcggtaacgaacgaaattgtttggttgactgctgatgaagaagatgaatttacagttgcacaagccaactctaagcttaacgaagacggtacatttgcagaagaaatcgttatgggtcgtcatcaaggtaataaccaagagtttccttcaagcattgttgactttgttgacgtgtcacctaagcaagtagttgctgtcgcaacagcatgtattcctttcttggaaaatgatgactctaaccgtgccttgatgggtgccaacatgcaacgtcaggctgtgccattgattgatccaaaagcaccatatgttggtactggtatggagtatcaagcagcccacgattcaggtgcagctgtgattgctaaacatgatggtcgtgttattttttcagatgctgaaaaagttgaagtgcgtcgcgaagatggttctcttgatgtttatcatgttcaaaaattccgccgttcaaactcaggtactgcttataaccaacgtaccttagttaaagttggtgatctcgttgaaaaaggtgattttatcgccgacggaccatctatggaaaatggtgaaatggctcttggacaaaacccagttgttgcttatatgacttgggaaggttataacttcgaggatgccgttatcatgagtgagcgccttgtgaaagaagatgtctatacatctgttcacttggaagaattcgaatctgaaacgcgtgatacaaagcttgggcctgaagaaattactcgtgaaattccaaatgttggtgaagattcactacgtgatctcgatgaaatgggaattatccgcattggtgctgaggtaaaagaaggtgacattcttgttggtaaggtaacacctaagggtgaaaaggacttatctgctgaagaacgtctcttgcatgccatttttggtgataaatcacgtgaagttcgtgatacttcactacgtgtacctcacggtggcgatggagtagttcgtgacgttaaaatctttactcgtgcaaatggtgatgaattgcaatcaggtgttaatatgcttgtccgcgtttatatcgctcaaaaacgtaaaatcaaagtcggtgataagatggccggtcgtcacggaaacaaaggtgtcgtctcacgtattgttcctgttgaagatatgccttacttaccagatggaacgccagttgatatcatgttgaacccacttggggtgccatcacgtatgaatatcggacaagttatggagcttcatttaggtatggctgctcgtaatttaggtattcatattgcaacgccagtctttgatggggcttcttcagaagacctttgggaaactgttcaagaagcaggtatggattcagatgctaagactgttctttatgatggtcgtactggtgaaccattcgataaccgtgtgtcagttggtgtcatgtacatgatcaaacttcaccacatggttgatgataaacttcatgcccgttcagtaggaccatactcacttgttactcaacaaccacttggaggtaaagctcaatttggtggacaacgttttggtgagatggaggtttgggcgcttgaagcttatggtgcttcaaatgttcttcaagaaattttaacatacaaatctgatgatgttacaggacgtcttaaagcttatgaagctatcacaaaaggtaagccaattccaaaaccaggtgttccagaatcattccgtgttcttgtaaaagaattgcaatcacttggtcttgatatgcgtgtccttgatgaagatgacaacgaagttgaactccgtgatcttgatgaaggtgaagatgatgatgtgatgcacgttgatgaccttgaaaaagcacgtgtgaaacaagaagctgaagaaaaacaagctgaacaagtatctgaagtcgttcaagaagattaaatttatctagtttataactagaagcgaatatagaattgatatgcaatgctagtcctaggatttattgaaatcctagctgggctagtatgatgataaatcgaagaaaggtaaaactagtggttgacgtaaatcgttttaaaagtatgcaaatcacattagcatcaccaagtaaggtccgttcatggtcttatggtgaagttaaaaaacctgaaacaatcaactaccgcacattgaaaccagaacgtgaaggactttttgatgaagttatttttggtccaacaaaagattgggaatgtgcgtgtggaaaatacaaacgtattcgttacaaaggaatcatttgtgaccgttgtggcgttgaagtaacccgtgcaaaagttcgtcgcgaacgtatgggacatatcgagttaaaagcaccagtatctcatatctggtatttcaaaggtatcccatcgcgtatggggctcacattggatatgagtcctcgtgcacttgaagaagttatttattttgcggcttatgttgttatcgatccaatggacacaccattagaaccgaagtcactccttactgagcgtgaataccgtgaaaaacttcaagagtacggttacggttcgtttgttgctaaaatgggtgctgaagccattcaagatcttcttaaacgcgttgatttagatgcagaaatcgcagttcttaaagaggagttgaaatcagcgacaggtcaaaaacgtgtgaaagcagttcgtcgtctggatgtgttagatgcctttaaaaaatctggaaataaaccagaatggatggttcttaacattttaccggttatcccaccggatcttcgtccgatggttcaattagatggtggtcgttttgcggcatcagacttgaatgacctttaccgccgtgttattaaccgtaacaatcgtttggcacgtttgttggaattaaatgctcctggcatcatcgttcaaaatgaaaaacgtatgttacaagaagctgttgatgcgcttatcgacaatggtcgtcgtggtcgtccaattaccggaccaggtagtcgtcctttgaaatcattaagccatatgcttaaaggtaaacaaggtcgtttccgccaaaacttgcttggtaaacgtgttgacttctctggacgttccgttattgctgttggtccaacactcaaaatgtaccaatgtggtgtaccacgtgaaatggctattgagctcttcaaaccttttgtaatgcgtgaaatcgttgctcgtgacctcgcagggaacgttaaagcagctaaacgtatggttgaacgtggggacgagcgtatttgggacatcttagaagaagttattaaagagcacccagtacttctaaaccgtgcacctactcttcacagattaggtatccaagcgtttgaacctgtccttattgatggtaaggcgcttcgtcttcacccacttgtatgtgaggcctacaatgctgactttgatggagaccaaatggccatccacgttccattgtctgaagaagcccaagcagaagctcgtcttttgatgcttgctgcagagcacatccttaaccctaaagatggtaagccagtcgtaacaccatctcaggacatggttttaggaaattactacctgactatggaagatgctggtcgtgaaggtgaaggcatgattttcaaagatcatgacgaagcagttatggcatatcaaaatggttatgttcatttacatacacgtgttggtatcgctgttgattcaatgccgaataagccttggacagaagagcaaaaacataaaatcatggttacaacagttggtaagattctcttcaacgatatcatgcctgaagatttaccgtacttaattgaacctaataatgcaaacttgacagaaaaaactccagataaatacttcttagagccaggtcaggatattcaagcagttattgataacttagagattaatattccctttaagaagaaaaatcttggtaatattatcgcagaaacttttaaacgtttccgtacaacagaaacttctgctttccttgaccgtttgaaggaccttggatattatcattcaacacttgctggtttgactgtgggtattgctgatatcccagttattgacaataaagctgagattattgatgcagctcaccacagagttgaagatatcaataaagccttccgtcgaggtttgatgactgaagaagatcgttatgttgctgttacaacaacatggcgtgaagctaaagaagcacttgaaaaacgtcttattgagacacaagatccaaagaaccctatcgttatgatgatggactcaggagctcgtggtaacatctcaaacttctcacaacttgccggtatgcgtggtttgatggctgctcctaacggacgtatcatggaattgccaatcttatcaaacttccgtgaaggtcttagtgttttggaaatgttcttctcaactcacggtgcgcgtaaaggtatgactgatacggcccttaagacagccgactcaggttaccttactcgtcgtttggttgacgttgcccaagatgttattattcgtgaagatgactgtggaacagaccgcggtttgacaatcacagcaattacagatggtaaagaggttactgagacacttgaagagcgtttgataggacgttatactaagaagtcaatcaaacatcctgagacaggtgaaattctcgttggtgcagataccttaattactgaagatatggctgctaaagttgttaaagcgggcgttgaggaagtaactatccgatcagtatttacatgtaacactcgccatggtgtttgtcgtcactgttacggtattaacttggcaacaggtgatgctgttgaggttggtgaagcagttggtactattgcagctcaatctatcggtgaaccagggacacagcttacaatgcgtaccttccataccggtggtgttgcttcaaatactgatattacacaaggtctcccacgtatccaagaaatctttgaagcacgtaaccctaaaggtgaggcagttattactgaagttaagggtgaagtcgttgcaattgaagaagactcttcaacacgtactaagaaagtattcgttaaaggtcagacaggtgagggagaatacgttgttccatttacagcacgtatgaaagttgaagttggtgatgaagtagctcgtggtgcggccttaactgaaggatctatccaaccaaaacgtctccttgaagttcgtgatactttatctgttgaaacgtacctacttgctgaagtacaaaaagtttaccgtagccaaggggtagaaatcggagataaacacgttgaggtaatggttcgtcaaatgctccgtaaagttcgtgtcatggatccaggagatacagatcttcttccaggtacacttatggatatttcagactttacagatgctaacaaagatattgttatttctggtggaatccctgcgacaagccgtcctgtccttatgggtattactaaggcttcccttgaaactaattcattcttatcagctgcatccttccaagaaacaacacgtgtccttacagatgctgctatccgtggtaagaaagatcacttacttggtcttaaagaaaatgttattatcggtaaaatcattccagcgggtactggtatggctcgttaccgtaatattgaaccacttgctgttaatgaagttgagattattgaaggaactcctgttgatgcagaagttacggaagtatcaacacctacaacagaagattaatcaaaaagaacttgagtttaactcaggttctttttttacaagaatttggaatgagcagatattttttattttattcttattttttatataatactctctaaaggaagtgtattatgtatcaagttgtaaaaatgtttggtgattgggaaccatggtggtttattgaaggttgggaggaagatattactgaaattgctgagtatgataccttatcagaagctttgctctattttcaagaggagtgggataggggacaggaaaagtggccttattttcaaagtaagtctagtttgttggcaacgttttggagtataaaagaaaaacgttggtgtgaagaatgtgatgagtacctccaacagtatcattccttaatgttattgaaagaatggcaagaaattcctaaggaagaatctattgagcgatttgaagtatttaataagatagctgagttgccatcggcatgttctttaaatttgtaattaaaagtagtttaaaaaagttagatagtttttatggggatataataggtttgttcagcctctgcttcataatatttatgttactacctctcaagaaatcattgaaaagatctcaccaattggtgagatttttttattttattttcgaatatatggttaaggaggttacgggatggttcaatcattagcaaagcaagtcattcatcaggcagtagaagtaaatgctcaagatatttatatcattcccaaaggtgattgttatgaactctatatgcgtattgatgatgaaaggcggtttattgatgtttttgagtttaataggatggctagtcttattagtcactttaaatttgtggcaggcatgaacgttggagaaaaaagacgaagtcaattaggttcttgtgactatgaactgtcagagggaagactggtttcattacgactatcgagtgtgggagattatcgtggtcaagaatctttagttattcgtattttgtattcaggtcatcaggacttaaaatattggtttgataatataaagcaaatgaaggaagtactgggtataagagggctatatcttttttccggccctgtggggagtggtaaaacaactctcatgtatcaattagcttcagaagtatttaaaaataagcaaattatcacgattgaagatccggtagaaatcaagaatgacaagatgttacaactccaattgaatgaggatattggaatgacttatgatgctttaatcaaactgtctttacggcatcgtccagatattttaattatcggagagattagagatcaagcgacggcccgtgctgttattcgtgcaagtttaacgggagtgatggttttttctactattcatgctaaaagtattcccggagtctatgataggcttatagaattaggggttaactatcaagagttagaaaatagtctaaaattaatagcatatcaacgtttaattggaggaggaagcctaattgactttgagacaggtaattttaaaaaacactcatcagacaagtggaatagacaagtggatatcttggctgaagaaggacatatcagtaagaaacaggcacaagtcgaaaaaattatccctcaagaaacaacggaaagtagtccaactttttaataatctttttgctagtggtttttctttaactgatatggtcaccttcttaaagaggagtaagttattgtctgattgttatacagatagtatgaataaggcattattagagggaaaagatttatcaaaaatgttaggagagttaggtttttctgacactgttatcacacaggttgcattagctgatttgcatggtaacatttcaaggagcctactaaagattgagtcttatttagctaatcttttgttagttagaaaaaaagtaatagaagtagctacttacccattgatattattgtcttttctggtgctaattatgattggccttaggaattatttaatgccccaattaggagaaaataattttgcaactagactgattacaaatgtgccgaatattttcttattacttttagcagttgtacttatttttagtttaatattttatattattcaaaagcgattgtcgcgcattaaagtagcttgttttttaacaacaattcccttagttggatcatatgttaagctttatttaactgcttactatgcccgtgagtggggaaatttattaagtcaaggtattgaattggaccaaattgttaaagtaatgcaaaatcagaaatccaaactttttagggaaataggatatgacatggaagaaggttttctatcaggtaaagcatttcaccaaaaagtattagactatccgtttttcttaactgagcttagtttaatgattgaatatggccaagttaaggcgaaattaggaacagagttagatatatatgctgatgagaagtgggaggatttttttacaaaattagctagagcgacccagttaatccaacccgttatttttatttttgtagctcttatcattgttatgatttatgcagcaatgctgttaccaatgtatcaaaatatggagatattatcatgaaaaatttattgttaaaatgtaaggataagaaggttaaagcatttacacttttagaatgtttggtagcattggttacaatcacaggagctttactagtttatcaaggactgacaaaattgttggctcaacagatagtagtgatgtcttcttccagtcagtctgaatgggtgttattaactcagcaactaaatgcagaatttgaaggcgctcatctggaatatttaagacagaacaaactttatttacgtaagcaagataagattgtaacctttggcaaatctaataaagatgatttccgtaagacaggttatgatggtcgaggttatcaaccaatggtttatgggttagacaattgtcaaatgagtcagaccaaaagtatggtaaaacttgttttttattttaaggacgggttaaaaaggacattttactatgattttaaagaagaaacttaaagctggcatccttttgcaagctattgtattggctgctgtatttacactcgtcttacagttttatctagcaagaatattggcaacagaaagacagtatcatagccaaattgaagcaagtaaagcttatttaacagcgcagttagcttataaaacaatagaaggtgactccatatcaggaaaatgttattttacaggaggatatgcttcatacctccaagaagggaactatttacaagttaaggttacattggataagggaggaaactataaccataagttttatcgtaaaacagacactctccaagtacctctcaagtctaatgataataaagcaagccataaacattaaaaatatacagtgatgaaatattagtaagacaaggttttgcttaaaaacaggatttttgtttgcttctcttttcagatgctgtgttttttgttatgataaattctggaggaaatcatgaattttgaaaaaattgagacagcctatgagctgattttagaaaatatccaaacgattgagaaccaattaaaaactcatatttatgatgccttaattgaacagaactcttattaccttggttcaagttgtgatttagatatggttgtggtgaataaccaaaaattacgtcaacttgacttaagtcaagaagaatggcgtcgcactttccagttcatttttatcaaatctgcgcaaacagagcaattacaagctaatcatcagtttacgccagatagtattggttttatcttgttatttcttttggaagaattaacgagtcaagagacagtggatgtcttggaaattggaagtggaactgggaatttagctcagactctcctcaataacagctcgaaagagttaaattatatgggcattgaagttgatgatcttttgattgatctatcagcaagcattgctgaaattataggttctagtgcccaatttatccaagaggatgctgttagaccacaaattttgaaagaaagcgatgtaatcattagtgatttaccagttggctattatcctaatgatggtattgctaaacgatatgctgtatcaagttctaaagagcacacctatgctcaccatctattgatggagcaatctcttaaatatttgaaaaaagatggaatcgctatatttttagcacccgaaaaccttttaacaagtccacaaagtgatttgctgaaggagtggttaaaaggatatgcagatgtcattgccgttttaactctaccagaaactatttttggaagtcgtcaaaatgcgaaatctatatttgttctcaagaagcaagcagaacaaaaaccagaaacctttgtatatccgctgacagatttgcaaaatcgtgagaatatggcaaacttcattgaaaattttcaaaaatggagcagagaaaatagtcattactcaaaaaatatgataaaatagagattgtgaaaacgctttagagaggtaaattatgtcaaaaacaatagcaattaatgctggaagttcaagtttgaaatggcaattatatgaaatgccagaggagaaagtagttgccaaagggattatcgaacgtattggtttgaaagattctatttcgactgtaaaatttgacgataaaaaagatgaacaaattttagatatcgtagatcatacccaagctgttaaaattcttttagaagatctaacaaaacatggtattatcaaagactttaatgaaattacaggtgttggtcatcgtgtcgttgctggtggtgaatattttaaagagtctgctttagtagatgataaagttgtagaacaggttgaagaattatcagctttagctccactccacaacccagcagctgcagcagggattcgtgcgtttagagaaatcttaccagatatcacgagtgtatgtgtatttgatacagccttccatacaacaatgcaacctcatacctacttatatccaatcccacaaaagtactatactgattataaagtacgtaaatacggtgcacacgggacaagccaccaatacgttgcacaagaagcagctaagcaattaggacgtcctttagaagaattaaaattaatcacagcacatgtgggtaatggtgtttctattacagcaaattatcatggacagtctattgatacatcaatgggattcacaccacttgcaggaccaatgatgggaacacgttcaggagacattgatcctgcgattatcccttatcttgtagctaatgatccagaattggaagatgcagcagctgttgttaatatgcttaacaaacaatcaggattgcttggagtatcaggaacttcaagtgatatgcgagatattgaagcaggtcttcaaagtaaagatccaaatgcagtgttagcctataatgtctttattgaccgtattaagaaatttattggacaatacttggcagtattaaatggcgcggatgctattatttttactgcaggtatgggagaaaatgcgccattaatgcgtcaagatgttatcgcaggattatcatggtttggcattgaacttgatccagaaaaaaatgtttttggttattttggagatatcacaaaaccagattcaaaagtgaaggttttagttattcctactgatgaagaattaatgattgcgcgtgacgttgagcgccttaaagctaaataagttatcaaaaaattgataagaccagaaaagttgatagtttaactatcaacttttttgtcttttgaacagatatgtaaaatgtacttgacaaaaaatgtatagttaactatactatgaatgtaaagctaactatacaaaaaaggtgtaagatatgaaaaattctctacaaaagttacgaaaatctaggaaattaagtcaagcagaacttgcagttgcacttggagttactaggcaaactattatttctctagaaaaagagaaatacacggcatctttggagctagcatttaagatagcgcgttattttgataaacaaattgaggaagtttttatttatacagaaagtgaaggaggatagaattttaatggaaaaatacagtccacaaaagacaaaaggttaaaagttaatctgtaatatgtcaaggatgtggactattgatttttgtccaccaatcgtttaccagcaatatgtttttatcattactattagtattagcattgcgatgtctatttttgctatttatcgctatgcttcattgaagaaaacgatataatagctgatgattaaattgaagttttagaaagtagtattctatgttaataaaaggattattgtcacccaatagtaaagtatctccgaaggattacaaagtatatatgagagttttgtcttttgtttttagtgtatgtagtttgattatgatagtatcatcatttctacatacctttgaatctaattttactaaaggtttttcctttggttcaggtattgccttatttgcaggaagtttttattttttggtgataacatttagtgaaaagcgatttcaacattactataccaaagtttttgatgagcgtaatcaatttattgctaatatgtcttgtcgacttcttttccttttatctgtccttgttttagtggtattgtgtctgattaatgtctggtttggtataactttttcctatgcaaagttcttgctattgatactctcttttattttatatggttatttattaatttactttattttacagaagttattgtgagataagtctataagatttgaaaatatgttatgatagaaaaaagttaataatttattttggaggtttttgtgtcatttattattagaaaaggcaaaattttagctttgctaatagcatttttagttattaatcaacttgttcctatattggctgtgtggctcctaaagaatcactatcaaacgccttttactagtatattgttgattggcttagaattacttattattgctcttttcctttattatgccaaggttaaacaaataatcagatggaaagcattattgacaaggaaagcattagttactattctcttaggttggttatcattgagggttccacaaattattggttacctcattatgactatgcaaggggttaaagatacagcaaatcaaacagtaattatggaattaacaaagcaacttccactagctttgatgttaatttttgccataattggtgcccctattatggaagaaattatatttcgctatattatccctaaagaactttttgcgaaacatcaaaaatggggttttgtcatcggtactttagcttttgctcttattcattccccttctgatataggtagttttattatttatgctgggatgggtgctattttatcttttgtttattataaaactgagcacttagaatatagtataatgattcattttattaacaatgctcttgcttatagcgtgttaatcagtacaatgatgaataactaaaaaaactttgagcaatttgctcaaagtttttttgctttctcaatagtagcatcaatggcagaaataacactatgcgtcagaccatttttttctaagtctaaaaggccagcaatagtagttccgcctgggctacaaatgttgtcgattaagtcagaggtgctattttgtccttgtaataggttttgactagaagctaagacagtctgtcctacaatagagagtgcttgttcttttggaaatccatattttacacctgctttagctaaggcttctataaatagatagatataggcagggctagaacctgctagagcagtgaaggtatcaaaattggtttctgctatatcaaagctacttccaaaactatccgtaatttctttggctaattgtcgtaactcatctgatacatgattgttgtaacaaatagctgtgcaactttgaagtatttgtgcgttaatatttggcataatacgaatcaatggtaaatcagaacgagttaattggcttaaacgcgctaaggagattcctgctgccattgagatgattggttttgtgatatcaagtggaagaagaaccttttcaaatagttgaggtttaatacctaacatgataatatcagcttgattgattaatgactgatgagattcggcgtaagtaacatcaagtctttctgcaatttcttttgaacgctctaagcaagatccggatatgataatgtcatgttgggtttgtttgaggccttgaataattgcactggccatttttccgacgccgataattccaattttcataatgttgatatggggatgaaaggagatactaaaatgtgtctaccttatgaaactcccatcctttctatcttaataacctttaataatatccaccgtcgagcggtctaatttgttaacgatggcctgaaggtaagcttgtgcttgtagaaaatcatccatagcgtagagtgtttgatgagaatgaatgtagcgtgcacagacaccgatagttgtagaaggaataccactattttttaggtgagcagccccagcatcggtaccaccatttgcagcataatattggtattttatacctgcttcttcagctgttgtaagtaagaaatctctcatatctttaagcatgatatgtccgggatcataaaaacggattaaggttccctctcctattttgccttgttccccataaatatctccagctggggaacaatcgacagctaagaagatatctgggttgaatttagttgttgaaacatgtgcgccacgaagtccgacttcttcttgaacatttgccccagcaataagtgtgttgctaagactttgatcttttaagctttttagcaattcggtcaccataagcacaccatagcgattatcccaagcttttgacataatatgtttttgatttgcagttaaaatggtttcagatttaggaacaatgatatcgccaggagcaatgccaaagctttcagcttcatttttatctgtgaatcctccatcaaaaacaatgtcactaattttgggtaatgttgttccaccgctttgtccacgaagaaagtgaggaggaactgagcctgatataacaggaatagcatcaccagaacgtgtgtagagggtaaagcgttgtgagctgactactaggggattccatcctccaacctcaagtacacgaaatgttccatctggctgaatatgactaaccataaagccgacttcatccatatgggcagcaaccatgactttaggagcattagtctcatgagtatttttaactccaaaaattccaccaagtccgtctgtctcaacttgatcaactaaaggagttatttcttgacgaaggaagttgcggatattgtgttcatagccagcaatcccatcaagctcagttacggttttaattttgttaaataaatctgacataattacctcaattctacaaatactattttagcaccttttaattaaaaataaagaacagaacaggtttcagtcaatataaagactttcaaaaagaatatcaagtactatcggaagactgttatgactgacaaagcctattatagtgaaaactgggttgaatacaacggagataatgtttatcggcttaagctaataaaaaggtagatagaaaagataatacggctaaaaaagtgataaccatagcaattaaagtcaaatttttggggtgattcttattgattaaaaatgaagttgtgcaaagcagtattagcgtcacaatagcaaaaagttctccattttgaagacgaaataaaaaccagtgatcacctaggaagagtagacctagcaaacaatttaaagcaggtactaataatttttctttcatgttttttctttctgtttgaatgattaaccataatggtatcttaagacaatgtcatcctattataccacaaggaataagttgttttttttcataactgttatgtggatttcttccatcaattcctgtgtctaattccggggggtatggtataataacagttatgaaaaataaaaaaatcttatttgggactggccttgctggtgtgggtttactggcagctgctggttataccctaactaaaaaagtaacagattataaacgtcagcaaatcactcagaccttaagagaattttttagtcagatgggtgatattcaggtattttattttaatgaatttgaatctgatattaaaatgaccagtggtggtcttgtcttggaagatggcagaattttcgaattcatttatcgtcaaggtgttcttgattatgtggaggtgagcaaatgattttaccagaatcttatgaagaaatagcagcctatattgatagcactaagaaagttgttttcttttttacagcagattggtgtccagattgtcaatttatatatccagtaatgccatcaattgaaaaagatttctcagattttgtctttgtacgtgttaatcgtgatgactatatagaattagctcagcagtggaatatttttgggattccgagtttcgttgttgtggaaaatggtcaggaactgggtcgtttggttaataagaatcgcaaaacaaaggctgaaattactaaatttctcgctgaaattaactataaataagacagaaaatagcaaaatttaaaggagaataaatgatttttacttataatagagagcatgttggtgataccttaatggttattgttaaggatagtcaaggagctaagctagatgttgatcgtcgcggacaagtagcacgcgtctatctgcaagatagtaaagaaacagttgcttggaatatctttgaagtgtcaagtttaattgttattgagggagcaggtcaaataactttatctgatcaagatattaaaatccttaatgcagaactactgaaagaaggattcgaagactctcttgttaataatattgaacctacatttgttgtggcgcaaattaaagaaataattgatcatccagatagtgaccatttacatatctgtcaagcagaaatcaacgatgggaagacggtccaaatcgtttgtggggcacctaatgcttcagtaggtcttaaaacagttgcagctcttccaggagctatgatgccaaatggtagccttattttcccaggaaaacttcgtggagaagatagctttggaatgttatgtagtgctcgcgagttagctcttccaaatgctcctcaagtcagaggtatcattgaattatctgatcaggtaattgttggagagtctttcgacgccaataaacattggaaaaattagtaaaaatcaacttagcttcagctaagttgatttttagttgtaaacttaagaagttacaatgactttttaagtgtgatgtgttgcaaaaaagcaatatctttataaggagctttgtcagcaacacttagctcgatagcaagcattttgtttagccaaccagtttcagttttaaaatggtttggttgtaatgaatagaaggtacgaataccctgataacgttcaactaataaatttgtattttgttttagttcttctaaggtataaatatttccctggtcaaaactggcacttttaaagtttgcttctcctgttaagagttccatcgcagtggaggtatcattgctaaaaataactgattgtaatattttaccggttatattatgtttgatgagagatagttctccattgggttttagaagtcgagaaaattcgtcaaaataagcaggatgattatgtttgtctatatattcaagaacattatgacaaataatagtatcaaagctttgatcaggcaaatctcttaatgcttcgtaggaacctaggattttataaatattgtcactttgattatcgtaaagcagtttaggattgggttcaatagcagttacattgttttcttttgctagatgttgttcggtgagacaaaaaccagctccaaaatctaaaacgttctgatttttgatatggcttaattgagcaaaagttatttcatattgtatttttccccaaggtttagccagcatttctttataactagttacatttgtcatcttaattctcccagaacaatttcatatattttagcatttttcttccttattttcgaataataatagtgaggaggtaatcaatgtataataaagttattatgattgggcgtctaacagcaaagcctgagatggtaaaaacaccaactgacaagtcagtgacgcgtgcaactgttgctgttaatagacgctttaaaggaagtaatggtgagcgtgaagcagattttattaatgtggttatgtggggtcgtctagcggaaacccttgcgagctatgggacaaagggctctttaatttcaatagatggtgaattgcgtacgcgcaagtacgaaaaggatggtcaaacgcactatatcactgaagtattagcatcatcatttcagttgctagaaagccgtgcccaacgtgctatgcgtgaaaataacgtttctggtgatttgtcagatttagtattggaagaagaggagctccccttttaaataaaatcactctcaaaatatcatttctaaatatactggttgcttttcacagaaagcaacctttttttattgaaaatagaaaggcaaacgattacaataaaggggatagaaagcaggtttaagatggaaaaagtcattatttttgatatggacggcgttattgttgattccgagtacacgtttttagataataagacagaaatgttacgtgaggagggtattgatacggacgtctcgtatcaataccagtacatggggactacttttgaattcatgtggcaagctatgaaagaggagtttggcttaccgaaaacagtaaaagagtatattgctgagatgaacagacgtcgacaagcgattgtggcgcgtgatggtgttaggcccatcaaaggagctcagcgactgattcattggttacaccaacatggctatcgcttagcagttgcgtcctcatctccaatggtagatattaagcgtaatctaaaagagttgggtgtgacagaatgctttgaatacatggttacaggagaagatgtatcgtcttctaaaccagcaccagatgtttttcttagagctgcagagcttttagatgtagaccctaaagtttgtatagttatagaagatacaagaaatgggagtttagctgctaaggcagcaggaatgtattgctttggctttgctaatcctgattatccaccgcaagatttatcaatggcagacaaggttatttcagattatcaagatatctatatttatcttccggagtaaaatggtatcttgaggaggataagcatatgttgatggtgttgttattccaaaggctaggaattattatgattttagcctttttattggtaaataatagttattttagacagttaattgaagagcggtctaaacgtgaaacggtagtccttgtcatcattttcggcttgtttgttattatatctaatataacaggaattgaaataaaaggggatcgaagtttggtcgagcgcccttttctaacaacgatttctcattctgactcacttgctaatacaaggactttagttattacaacggcaagtttggttggtggacctctggttggatcaattgttggttttattggaggagttcatcgcttttttcaaggaagcttttcaggttctttctatattgtcagttcagttctagtcggcattgttagcggaaagattggtgataagcttaaggaaaaccatctctacccttcaacaagccaagttattttaattagtattattgccgaaagtatccagatgctatttgttggcatttttacaggatgggaacttgtcaaaatgattgtcattccaatgatgattttaaatagtttaggttccacacttttccttgcgattttgaaaacttatttgtcaaatgaaagtcagttacgcgcagttcaaacgagagatgttcttgaattgactcgacagactctgccctaccttagacaaggtttgacaccgcaatctgctaggagcgtttgcgaaattataaagaggcatactaactttgatgctgtgggattaacagatcggtcaaacgtattagctcatattggtgttggccatgatcaccatattgcaggacaaccggtcaaaacagacttatctaaaagtgttatttttgatggcgaaccaagaattgcgcaagataaagcggcgatttcttgtccagatcacaactgtcagttaaattctgctattgtagttcctctaaaaataaatgataaaactgtgggtgccttaaaaatgtactttgcaggagataagacaatgtctgaggtggaggaaaacctagtccttggtttagcgcaaatattttcaggacaactggcaatggggataacagaggaacaaaataagttagccagtatggcagagataaaggctttacaagcacaaatcaaccctcatttcttctttaatgccattaacacaattagtgcattaatccgtattgattctgataaagcacgttatgcactgatgcagttaagtactttttttagaacaagtttgcagggtggtcaggatcgtgaggtaacgcttgagcaagaaaaatcacatgtggatgcttatatgaatgttgaaaaattacgtttccctgataaatatcagttatcttatgatattagtgcaccagaaaaaatgaagttaccaccttttggtttacaggtactggtagagaatgcagttcgacatgctttcaaagaacgtaagacggacaaccatatattggttcaaataaagccagatggtcattattattgtgtttctgttagtgacaatggacaaggaatctcagatactatcattgataaattaggtcaagaaacagttgcagagagtaagggtacaggtactgctctagttaatctaaataacaggctgaatttattatatggtagtgtaagttgccttcatttttcgagcgacaagaatggtacaaaagtttggtatcgaatacctaatagaataagggaggatgagcatgaaaattttaattcttgatgatgaaatgtttgccagacaagaattatcgtttttagttgaacatagccaggaggttgacaaccctgagatttttcaggctgaggatatcagtgaagccgaaaaaatcttatttagacagcaaattgatttaatttttttagatatttcgcttagtgaagaaaatggctttactttggctaatcagttgagccaacttgcacatcccccacttgttgtttttgcgacagcttatgataactacgctgtgaaagcttttgaaagtaacgctgttgattatatcatgaaaccgtttgaacaacagcgcgttgatatggctctatcaaaagtgaagaaattgagccaactcaccactgcttcagatgtagagcaagcaatacctaaaaaagccagtgttgaattgttaaccttgacattatcagatcgcagtgttgttgttaaaatgcaagatattgttgcagctagtgttgaagatggcgaattaactgttagtacagttcagaaaacttacactattcggaagacactcaattggtttaagtcacgcgctgtagcaccatattttctccagattcatcgaaacacagtgattaatctagagatgattgaggaaattcaaccttggtttaatcatactttgttactaattatgtctaatggagagaaatttccagtaggtcgatcgtatttaaaagacctaaatgagcatttaaccatgtaaaagtgcttttgcgaacttccctttgttgtttagaagcttgaatttgcaattcggcttctttttttggtaactgagactaaaaatgaaaacgttttatttgttttgaagtacaatatagctatcaataaaacaagttaaaacattgtaataaaaggaaggggtagtgactatgaaacacaccagtaaagaaaccaaaacaaaagaagctccaatgtttattcaaatgtcaatatatgcagctattctattagtttcacaaatgatttcaatgttattaccgaaatcactaccaatcccaacgacggttattggtttggtgctaatgtatgtattgctaactgctaaaattatcaaggtagagtgggttgactcttttggggctttgatgataagcatgattggttttatgtttgtcccctcaggaatatcagtagcagcgaatcttgatatcctaaaagctgaaggcttgcaactagttgctgttattacaatctcaactgttgttatgttggtagtggtagcatatgttgcacgattaatacttgctatcagagaactcagtgtcacagatttatttaaaaagatattacctaaccactatagtaagaaagtagaggaaaaataatatggaactcttaaaaacacccatctttggtatttgcttttctttaatactctatacgataggagaacatttatttaagaagagtaaaggtttcttccttttgcagcctcttttctttgcaatggttagtggtattgtcattctttggcttatgtcaaaaggtttaggaaccgatgttaagacattttatacacaagcttataaaccaggtggtgatttaatattttggtttttaaatccagcgacaattgcttttgcagttcctctctataagaaaaatgacgttgttaaaaaatattgggtagaaattctcagcagtttagtaatcggtatgattgtttcccttatacttatcgtcgctatttctaaaatggttgggcttagtcaagtcggaattgcttcaatgttgccacaagcagcaacaacagcaattgctcttccaataacagcagcaattggagggaacacagctgtgacagcaatggcgtgtatcttaaatgcagttattatttatgcattaggtaaaaaattagtgtcatttttccatttgaatgatagtaagattggtgcaggattaggtctagggacctctggtcatacagtcggagcagcctttgcattggaattgggagaactgcaaggtgcgatggcagctatagctgtggtggttatcggtttggtagttgatttggttattcctatctttagtcatttgattggtttgctataactaatagcgtggttaaggctgaatttattcagcctttttatgatgtctattaaaatacattggattaacatggtttatgagctagtgtctagaattgtgttttacctaactttaagttattaatgataaaataacaaattttctaattaaccagttaagtaattgttctcctacttttttcttgttataatgaaaaaagttgtcaaaaatattatttatcaattaaaaaaggaggtttaatagtgactaaatatttgaagtacatctcttttgttgctttgtttctggcgagtatctttttagtagcttgtcaaaatcaaaattcacaaaccaaggagcgaacgcgaaaacaacgacccaaagatgaattggttgtttctatgggggcaaagcttcctcatgaattcgatccaaaggaccgttatggaatccataatgaaggtaatattactcatagcaccctattgaaacgttctcctgaactagatataaaaggagagcttgctaaaaaatataaaatctctaaggatggcttaacgtggtcgttcgacttaaatgatgattttaaattctccaatggtgagcctgttactgctgacgatgttaagtttacttatgatatgttgaaagcagatggaaaagcttgggatttgacctttattaagaatgttgaagtagttgggaaaaaccaggtaaatattcatttgactgaggcgcattcgacatttacagcacagttgacagaaatcccaatcgtccctaaaaaacattacaatgataagtataagagcaatcctatcggttcaggaccttacatggtgaaagaatataaggctggagaacaagcaatcttcgttcgaaatccctattggcacggtaaaaagccttattttaaaaagtggacttgggtattacttgatgaaaatacagcactagctgctttagaatctggtgatgttgacatgatttacgcaacgccagagcttgctagcaagaaagtcaaaggaacacgtcttctagatattgcttcaaacgacgttcgcggactgtcattgccttatgtgaagaaaggtgttgtgaaaaattcaccagacggttatccagtaggaaatgatgtcactagtgatccagcaatcagaaaagccttgactattggtttaaatagacaaaaagttctggatactgttttaaatggttatggtaaaccagcttattcaattattgatagaacaccattctggaatccaaaaacagcaattaaagataataaagtagctaaagctaagcaacttttgacaaaagctggatggaaagaacaagcagacggtagccgtaaaaaaggaaatcttaaatcggaatttgacctttactaccctactaatgatcaattacgagcaaacttagccgttgaagtagcggagcaagctaaagccttaggtattactattaaactcaaggctagtaactgggatgaaatggcaactaagtcacatgattcagccttactttatgcgggaggacgtcatcatgcgcagcaattttatgaatcacattacccaagtttagctggtaaaggttggaccaatattactttttataacaatcctactgtgactaagtaccttgacaaagcaatgacatctcctgaccttgataaagctaacaaatattggaagttagctcagtgggatggcaaaacaggtgcttccactcttggagatttaccaaatgtatggttggtgagtcttaaccatacttatattggtgataaacgtatcaatgtaggtaaacaaggtgtccatagtcatggtcatgattggtcattattgactaacattgctgaatggacttgggatgaatctgctaagtaactaatttagttaatgtaggctactttaagtttggagtcagagaaaacaatgtacaccttatggtgtgaatggtttcctcgactccttttttaacaattaaggagatttatctgtgaaacatattaccactgtagttatctggaagatacttaggtgtttgtcactcgtttttggagtatcaattttgacctttattttactaaaacaatcaccggttgatccagtcatggcaagtgtcaattatgacacgtcactaacccctgttcagtacaaagcgattgctcaccactatggtttggataagccagctccggtccagtattttatttggttaaaaaattttatacagggacatttagggacttcactagtttatcggcaacctgttattgatattattagatcacgggcaggtgcctctttcatacttatgggactctcctgggtcttatcgggtcttattggatttatcttaggaactttatcagctttccatcaagggaaattgcttgatcgaattgtaaggtggttttcttaccttcagatatcagtaccaactttttggattgggctcatttttttattaatcttttctgtccagctggggtggttcccgattggtatttcttccccgataggtactttgagtcaagatattacgttagctgatcgtattaagcaccttattttacctgttttcacgctaagtattctaggcattgccaatgtaactcttcatactagaactaaaatgatgtcggtactttctagtgaatatgtcttatttgccagagcgcgtggggaaacggaatggcaaatttttaaaaatcattgtcttagaaatgctatcgtaccagctattacactgcatttttcctattttggagaattgtttggaggatccgttcttgctgagcaagttttctcatatccaggactagggtctaccctaactgaagcaggacttaaaagtgatacaccgctacttctagctattgtgatgatagggacattatttgtttttgcgggcaatcttattgcggatattttaaacagcataatcaatccacagttaaggagaaaagtatgatattgagacgtcgaactattgttttatggcaactgggtatcgccatttctctcattcttagtattctagccttaaatctttatttccatagtactcccttgcaaaccaatgcagctttacggaaccttgctccttcattaaaccatctttttgggacagatggtttaggtagggatatgtttgtcagaacgattaaaggactttatttctctctacaagtctgcttattaggtgcccttatgggggtcattctggcgacagtttttggagtgcttgcaggtttaggaaatagcattattgataaaataatagcatggttagttgatttgtttattggtatgcctcatttgatttttatgattctcatttcttttgttgttgggaaaggtgctcaaggggtcatcattgcaacggctgttacacattggccttctttagcaaggcttatccgcaatgaagtctatcatctaaagaataaagaatttgtccaactttctaaaagtatgggaaaaacgccttattatattgtgaggcatcatatcctgcctttgattgcttctcaaattttcattggttttatcctcttatttccacatgtcatcctacatgaagcatcaatgactttcttaggatttgggctctctgccgaacaaccttcggttggtatcattctgtcagaggcagctaagcatatctctcttggaaattggtggttggttatctttccaggactttatcttattttggttgtcaatgcatttgatactatcggagaatctttaaagaaactcttttaccctcaaactgatcatttttaggaggtagagatatgacagaaacattattaagcattaaagacctctccatcaccttcactcaatacggaagatttttaaaaccatttcaatcaacaccgatacaagcgctgaatttagaaattaaaaaaggtgagttattagctattataggtgctagtggttcagggaagagtttattagcacatgctattatggatattcttcctaaaaatgcatctgtaacaggagatatgatttatcgtggtcaatcactaaattctaaacgcattaaacagttgcgaggaaaagatattacgttgattccacaatcagttaattatttagatccatctacgaaagtcaaacatcaggtgcgcttaggtatctcagaaaattcaaaggctactcaagaaggattgtttcaacagtttggtttaaaagaaagtgatggtgacttgtatcctttccaactttctggcggaatgctccgacgtgttttgtttacaacgtgtattagtgataaggtttctttgattattgcggatgagcccacccctggattacatccagatgctctgcaaatggttttagaccaactacgctcctttgcagataaaggaataagcgttatatttatcactcatgatattgtagcagctagtcaaattgctgatcgtattactatttttaaagagggaaaagctattgaaacagctccagctagtttctttagcggaaatggagagcagttacaaacagaatttgctagaagtttatggcgctctctcccacagcaagaatttttgaaaggagttactcatgaccttagaggctaaaaagcttggcttttatcataaaaaagatcaatggctttttaaggagattaatttagaggtagcacctggtcaagttttaggtatatttggacaaagtggttgtggaaaaactagtttatccagggtgcttgcaggttttttacatcctaaatctggtgaagtattagttgatggcagtaatttgcctagcaaagcatttagacctgtacaacttattcaacaacatcctgaaaaaacgatgaatcctttatggcctatgaaaaaaagtttggaagaagcctattacccaagtcgagatttactagatgcttttggaattcaagaaaaatggctaaatcgtcgacctagtgaactctcgggaggagaattacaacgcttttcgattgtgcgttcattacatccagagactaaataccttattgcagatgaaatgactactatgttggatagcattacacaagctagtgtatggaaaagcctgttggagattgtaaaggatagaaatttaggtctcatcgttattagtcatgatttcgctatgttagagaaactttgtaaccaatgctatatgattgaagagaatcgtatcgtatctttcaatggagattaaaaaactcacctactatatcaattagtaggtgttttttattaagagagtattgagggtgactgatctactcatgactctaacattttggtaacgttggtgagaaattctaatgttttgggtattattgactaatttattttataatttatagattttttaaaaagataagctaaggatttgcatagggatatgtaatcgtttacaattatgttgtaagctagtcttatttaagtttctgccttggagtcacagactctccgttaaatagataaggataaacagatggaacaatttaaacatgatgccaaagccttgttagaggcaattgggggtaaagaaaatattagtgcagtgacacattgtgctacacgcatgcgatttgttttgaatgacagtagtaaagctaaggtaaaggtaattgaggagttaccatcagtcaagggtacctttaccaatgctgggcaatttcaagtcattattggtaatgatgtccctattttttataatgcttttgtagccgtttctggtattgagggtgtgtctaaagaggcggcaaaatcggctgcccaaaaaaatcaaaaccctttacagcgtgtgttgacaatgctggctgaaatatttacaccgattattccagccattattgttggtggtctgatccttggttttcgtaatattttagatgccgttccatttgaatttttaggtcaaaaagttgttgatggtgtcaggcaagtagactcttctgggcatccaatttggaatactctagtagatgtttcaacgttttggagcggagtagactcttttttatggttaccaggtgaagctatatttcatttcttaccagttggtattgtatggtctgtgactcgtaagatggggactactcaaatcctcggtattgttctaggtatctgtctagtgtcgccacaattacttaatgcttattctgtagctagtacttcagcagcagacattgctaaaaattggtcttggaattttggttactttacagtacaaaaaattggttatcaagctcaagttattccagctctgttagctggtttgagcctgtcttacttagaaatcttctggagaaaacatattcctgaagttgtttcaatgatttttgtgccatttctatccttagttccagctattatcttggctcatactgtccttggacctattggttggacactaggtaaatggatttctgctatcgttcttattggattgactggtcctgtaaaatggctctttggtgctatttttggtgccctgtatgccccatttgttattactggtttgcaccacatgacaaatgctatcgatactcaactcatagcagatacaaaaacacatacaactggcctttggccgatgattgctctttcaaatattgctcagggttcagctgtactagcttattattttatgcatcgtcatgatgaaaaagaggctcaaatatcacttccagctgctatctcagcctaccttggtgttacagagccggcgctttttggtgtaaacgttaaatacatttatccatttgttgctggtatgattggttcaagtgtggcaggtcttttggcgacaacttttaatgtccaagctaactctattggtgtaggcggtcttccaggcttcctgtcaattaacgttaaatatatgggatatttctttatctgtatggcagtggctatctttattcctttatttttgacactattctttaaaaaatcaggtattttgacaaaaactgaagaggaaaaattagtacctgatgctgtcattgcttcaacaacagaaacaaaatcagcaaaagaaaaagctgtcgtatcaggtacaaagcttagtgtagtaagccctttatcaggtttagctaaaccactggatcaagctagtgatcctgtcttttcacaaggaattatggggaagggagtggttatcgatccaagtgatggagaactagtttcaccggtcgatgcgacagtttcagttcttttccctacgaaacatgctattggattgttaacatcagagggggttgagtttcttattcatattggtatggatactgttaatttagaaggaaaagggtttacctctcatgttgctcaaggtgacactgtaaaagtaggagataaactcattactttcgatattccaatgataaaagaagaaggatacattgtggaaactcctattctgattactaatcaacaagaattccgaccagaagaattgatagatttacccaaacagataaaacgtggacaagcattaatggttgccaagaaaatttaaaagtaattaggtattctttttaaaaaagagcactcttataaaatgagaggtaatttgaggaattgtttgaggggcttaatacattagctccttgaattattttgaacataagaaaaaactcataggaacaaatatcactgtaaaaatgttatatttttgatgatagttgatgttatagttagactgctaaatacagcagcattttgggaaaggagtagaatatgacgattgataaacgtaaagttgtctatcaaatttatccaaaatcatacaaagacacaactggtaatggggttggtgatcttcgtggtattatcgaaaaattaccctatttagcagaacttggtattgatatggtttggctcaacccattttatccaagtccacaacgagataatggatatgatatctctgattatacagctattaaccctgattttggaacgatggacgattttgaagaaatgattgaggtgggacgtcaataccgtatagattttatgcttgatatggtgcttaatcattgttcaatagaacatgagtggtttaaaaaagcacttgcaggagatcgctactatcaagatttctttatcttacgtgataatccaacagattgggtatctaaatttggtggaaatgcttgggcaccatttggtgatacagggaagtattatcttcatctttttgatatcactcaagctgaccttaattggcgcaatgccgatgttcgcaaggaactttttaaagttgtcaatttttggcgtgataaaggggttaaaggttttcgatttgatgtgattaatttaattgggaaagatgagatacttgagaactgcccaattaatgatggaaaaccagcttatactgatcgtccaataacacatgattatctcaagatgttgaataatgctagttttggacaagatgattccttcatgacagttggtgaaatgtcttcaacgacaattgcaaattgcattctttacactgcaccagaacgtgaagagttatccatggcttttaattttcaccacctcaaagtagattataaagatgggcaaaagtggaccattatggcttttgattttcctgcattacgtgaccttttccatagttggggcgaagggatgagcgaaggaaatggttggaatgctttattctataataatcatgaccaaccgcgagcattaaatcgttttgtagacgtgaaacgttttcgaaatgaaggagcaaccatgttagcagcatctatccacttatcgcgtggtactccttatatatatatgggtgaagaaatcggaatgcttgatcccgattacagttctatggatgattatgtggatattgagagtttgaatgcctaccaaataatgcttgatgaaggcaagtcacaagaagaggcatttagcattattcgagcgaaatctcgagacaattctcgagtaccaatgcaatgggatgatagtacgaatgcaggtttttctgaaggcgctccatggttgaaagtaggaaaatcatataaagaaatcaatgtcgcaaaggagaaaacagggctgatatttactttctatcaagagttgataaggctacgtaaacaactgccaataatagctgacgggaattataaagcagctttcaaagataatgaaaaagtatatgcttttgaacgccatcttgataaggaaaaacttcttgttttaaataatttctttgctgagaaagttaagataaaattaccggagaattatctccaaggacaagttcttctatcaaattataaggatgttactcttgatgaaacggttactttgcaaccttatcaaactttagctatcttagtgtcataacattttaaaaacctttacttattcaattaagtaaaggtttttaaagtgctgcttgtggaaaggaatcttgctctagattttgcaatttctttcttttttctttactctataacaatagcccaaattcattcaattgatagtagtgccagattgggctcaaatgacctagaaaaatgtaaacggttactataaaataaaaatagaaaggaaaacaaatggttgataataagactgttgtgataatgttggtatttttagctcggaaaaatctttccttgtatgagttaacagtgcaaacaaagttttcaataaaagttatcatagagcaaattaactatctcaatagttttttagcaaaaaatcacctaccagctattgctcactctgctggacgttatcagttattaggagatgaaaaagagcatgataaaattgtctccttattagaagctgagcaattttacctaacccaggaagaaagggtatgtctgatttacctttatagcttttgccgaagagagtttgtctccaatgtgcattatcaagattttttgaaagtaagtaagaatactactttatcagatatcaagatgctacgttctaaattagcaaaaagaggtatctcactcacttatacaagagcaaagggatatagtctagtaggagatgagatggataagcatcaagttgcttttcagatgataactcaactactagaatctcccattggtttttggtctttgaattatatcttgtcttcttggaaattcgctctctcatatgagaagttagaaaagacggtagaatatttctatgaatcttttcaactttctccaatacaagataggcttgagaaatctttatattttatcattttaatactgtgtcgttatcaaaggtcagtagatcgtgttttgcagggttctcctattgtttctgaacaattaaaagagttaacgactattattgtgactaatttaagtcaggatatttccttatctaaaccattagatcagaaagaaaaagattatattaccttgatcttatctggctgttttgaaggtgagggaactaaagatgatgatttctttgaagcattggcaaaagcaatcgttgatgagatggaaactgtttcacttcttaatttttccaataaagaagagttattacaaggtctgaagcgtcatattattccagcttatttccgattgaaatatggtttaactggcgatagtggttatacacaaaatattaaagagcattacagtgatttatttctattggttaaaaaggcactacgtcctttggaagagcaagtaggattaatacccgatagtgaaatttcttacttcgtgattcactttggaggctatcttagacaatcaggtggtacacaatcaatgtcttataaagctttgatactctgtccaaacggcgttagttcatccttagtgattaaggaaaaattgcgtggattatttcctcaaattcattttcatcgtgtctctaaaattgagcagctgaaactgattgacaatcaaacttacgatatggtcttttctactatatttgtagaaacaaaaaaacctaattatctagtttcgctgatgatgacagcagagcaagtacaacagctcaaagaactggttatttcagattttcccaaggcttgccttgacgatttccaacttgatcaattaatagcaactataaaaaaatacgctcatgttcattgtgaagaggaattaaaattggctttgaggacaatggtaaaacaagatatacttagaaaggatgtgaggcccttgttgcaccaacttataacagaggaaacttatcagacaagttctgaacaaatgaattggaaagaggcaattcgtttagcggcaaaacccttgttagcttctggaaaaattacggaaagttacccagaagctatgattgaaaaagtcgaagagtttggtccttttatcaatcttggtaaaggtattgctattccacatgccagaccagaagatggggtaaactctgtcggtatgtcaatgcttgttttggaacagccacgccgtacgcatgaaaactttctcttcatccttttgtgcccggacatcaattttgaaaagattcctttttaaatcaatgatctgcttagcctctttctccaaataattggactaaataatcttccaaatggacagaaatataccgttgtttgcgacgataactgaggtcttttttaggaaataccatcactttgagaaaatataagcacatttttcggataagatttaggttaaatgcggctcttttatccaatgtctgatgatgatcttcatgataaacaacgtccaataaccagtgcatactctctatctgccaatgacctcgtacacaattggcaaatgtgaggacatccggcttaaagctaaagataaaataacgattctcttgactcagctgaccatccttatcaatcgtgttacgagtcatcccaataccacgtaacttatgccatttgggatggttttgacacaaccatttgatatcggaagacacccagtattctctaacttcaatctgtcccctagatttttcaacagtctgataatactgcgcattttcttggagttcttccaataagttgacatcactaaaataaagagcaatatcatcataaagtgtttcttgatttcctttgacggctaagcaatagtctgctttaccttttataatcgtatcaacgatagccgtctgcgtgcccattgcgtctatcgttacaatgcttttacggatatcaattgtccgcaataactgaggaatggcaacaatttcattacttttctcctcaaccgctacctgtcccaaactaagatgatgacccccatcataagccgttacaatatgaacaggcttctgatttttacctcgattgcctcgaatcgttttaccgtccactgaaatcagttgatgaacggcatctaagcttgtcaatgattgctcaaattgaactttaagctcttttaaacggtctgaattaacaagactaatcacacgctctaaggtatcatgagacggacaaccttcactcaaatcaacgtaggtcgcaaacaatggttcattcatttcaataaaatcttccatctccttccaggtttcaatgccagctaactgacaaacaaagacaagaaatagaatggttgataaggggtagcgaattttccaagattgacgactatccaattcaactgcgcaatcatcaatagaaataataaaatcaatcatcgtagtcacctcatctatagtgtactactttgattgattttgtcattatgaatctagttttctgaaaacaaaagtttcttcatgcgtttggcgtgtggaacagcctatttatttattggatgaccccaaacaggaaatttatctcttattatgcatagcagctattgataatgaaacgcatttgaaagctctatcgcatttgacaacaatacttcgtgataataataatgttaaagctttgttagcttcacgtaggtatcaagatattgaaatgattataaaacaggaggattaaagatgttaagaattggaacagcatgtggatcaggtttaggttcaagttttatggtacaaatgaatattgagtctattttgaaggatttgggggtttctgatgttgaagttgaacattatgatttaggtggagcagatccaagtgcagcagatgtttggattgttggtcgtgatttggaggattcagctggtcacctgggggatgttcgtattttaaacagtatcattgatatggatgaattgagagaattagtgacaggtatttgccaagaaaaaggcttaatctaggaggttgatgccatgaaaggtctattggattttttagttaatattgccagcacgccagctattttagtcgccttgatagccattatcggtttagtactgcagaaaaaaggcgttcctgatattgtaaaaggtggaataaaaacatttgttggcttcttagtggtttctggaggtacagggatagtccaaaattccttgaatccatttggaaaaatgtttgaacatgcttttcatttggtgggggtagttcctaataatgaagccattgtagcagtagctcttacgaagtatggctcagcaactgctttgattatgttagcgggaatgatttttaatattttaattgctcgttttacaaaatttaaatatatttttctgacaggacatcatacattgtatatggcttgtatgattgctgttatttttgccgtagcaggctttacttcgttctcgctcatcctttttggaggtctagcgttagggattattatgagcgtatctcctgcatttgtgcaaaaatacatgattcaactgacaggtaatgataaggtggcacttgggcactttggttctttaggctattggttgagtggatttattggtggaattgttggagataaatcaaaatcaacagaagatattaaatttccaaagagtttatcatttttacgtgacagtaccgtaagtattactatctcaatggcaattatttaccttatcgttgcagtgtttgctggtgaggcttatattgcaaaagaaataagtaacggtgtcaatggtcttgtttatgccctccaactagctgggcaatttgcggcaggtgtattcgttattttagcaggtgtacgccttatcctaggtgaaattgtaccagcctttaagggaatctcagaaaaattggttccaaattcaaaaccagccttggattgtccaattgtttacccttatgcacctaatgcagtattgattggttttatctcaagttttgttggtggattggttagtatgatagtcatgattgtgactggcactactgtcattttaccaggggtcgttcctcatttcttctgtggggcaacggcaggtgttatcggtaatgcttctggtggtgtgagaggagcgactattggtgcatttgttcaaggtatcctcatcagtttcttgccgattttcttgatgcctgtactaggtggacttggtttcaaagggtcaacattctcagatgctgattttggtttgaccggtatcattcttggcgctcttaatcatgtcggcggtgcgatagctattgttattggtattgtagttatcttaattggactttttggcatttcatttgttggaaaatcaacccataaggaaggttaataatgacatcaccagaagaaagatattcatctctaagacgatttgcaacggagattcgtttaaatactctagaaacgctaaaccatttaggattcggtcactatgggggtagtttatcaattgttgaggctttggctgttctgtatggtgatattatggatataaatcctgaaaaattcaaagaaagtgatcgggattatatggtcttatcaaaaggacatgctggtccagccttgtatagtacactctatttaaaaggtttttttgataaaacattccttcattcgctcaatacaaacggtaccaaactaccttcgcatcctgaccgcaatttaactcctggtatagatgtaacgacaggctcgttaggtcaaggcattagtattgcaacgggaattgcttatgctcaaaagattgagaattcaagctattatacttatactattgtaggtgatggtgaattaaatgaaggacaatgttgggaggctatacaatttgctgcgcatcatcaactgcaccatttaattgtttttgtagatgataataaaaaacaattagatggtttgacagctgatatttgtaatcctggagactttgttgctaaatttgaagcttttggatttgatgcagtacgtgtaaaaggagatgacattgaggcaattgacaaagctattaaaacttttcaagattcaaatagtgtcagaccaaaatgtattgttttagatagcatcaagggacaaggtgtgaaagagttggaggagttagcttctaatcatcatttacgaccagatttacaacaaaaaacaatgttagagcgagcgttgataagcttgagagaaagtttggaggtggtagaatgagatgttcaaccaaagaaatgaggcttgtctatcgtgatttcctccttcaagctaatcaagaaaataaacaaattaccgttttagaagccgatttgtcgagttcaatgtcaacaaatgcactggcatcagaatttggaaaacgttatattaatctaggtattatggaggctgagatggtaggccttgcagcagggctcgccattaaaggttacaagccataccttcatacttttggtcctttcgcgtcaaggcgtgtctttgatcaagtattcttatcgttaggttactcacaattatcagctacgattattggctcagatgcaggaattagcgcagaaatgaatggcggaactcatatgccttttgaagagttaggtctactaaggttaattcccaaagcgactatttttgaggttagtgatgatattcagtttgaagcaattttaaaacaaacattaagtattgatggcctaaaatacattagaactattcgtaaggcccccactgcagtttatgagggacgcgaagatttttcaaagggttttatacaattacgccagggaaaagatattactcttgtagcaagtggtattatggtttctagagcgatagaagcagccgactacctcaaagaactagggattgaggcctcagttatcgacctttttaaaattaagccccttccagaagaactgaaaccattactgatagatcaatccattgtaactattgagaatcataaccgtattggcggtatcggaagtgcattatgcgaatggcttagtatggagaaagacactactgttagtcgtatgggtattgatgagcgatttggtcaggtaggtcagatggaatatttattagaggagtatggactcgctgttaaagatatagtacagcattgcaaatcaatttataaatcataacaaaaaggcaacattggagttgcctttttgttattttctgaaatttttaagttttgtataagtatcttgtggtattttatccttactaaaaataaaggggtggtcgttatgcgagcttggaaaggtattgttttaattttatctagcatagtggtgacactagtagcatggcaaaatgcaggattaagtgaatttgttgtaccaggattagctttgacaagtttatcgctaacattcctcttatcaaccaaatttaggatacttgaaagttactttcaaggtattgaaaatatgtatttttaccacaaggtaatggctgtattttcaatgattttgcttctattgcacaaaattggtcttggacaaggcggacatggaagtgagtttgcaaagactattggcagtgcgggattatatctttttctaagtattgtttttgtagcttatttcggaaattttttaaagtatgaaatttggcgttttattcatcgctttgtttatttagcttatattttgggattggtacatacttttatgattttaggagataggatactaggaaatactttactcagtttaatcgtattaggttatgctgtcattggggttatatctggattttatattattttcctatattctagaatgcgttttcgtcgtgtagggtacgttcaaaaggttactcatcttaaccatgatacaactgagattgaaatagcaatgaagcgtccttatcgatatgactatggacaatttactttttttaaaatttatcaagctggctttgaatcagcagctcatcctttctcgatatcaggtggtcatgatagagtgatatttttaactgttaaagcttcaggagattatacgaaatccatttacaaacagctaaaagttgggacaaaaatagccttagatagagcttatggtcatatgttatttgataaagacaagaaagaacaggtttggattgcaggaggtatcggcatcactcccttcatttcatttattagagaaaatagtattttgactaagagagttgacttcttttataccttttcaaatcaagacaatttgatttatcaagatatgttagaatcctatgctaaagccaatcctaattttaaacttcacttaaataatagtagcctcaaaggaagacttgattttagtcagtctgtttttgaaggacaaccaacaatatttatgtgtgggccaactagtatgacatctacttatgctaaggtctttcggcaaaaagatgcaaagtctcgtttagtctatgaaggattttcctttagagacagttggttatccatatttctattaaaaacttttgacaaagtttattctaatttgataaaataagagggtctataagacaaaccaactttttcttggttttaggagtgccaatcctaagactcggatgaagcaataaaaggagaatatattatggcaatctcaaaagagaaaaaaaatgaaatcattgctcaatatgcacgacacgaaggtgatacaggatcagttgaagttcaagtagcagttcttacttgggaaatcaaccaccttaacgaccacatcaaacaacacaaaaaagaccacgctacttaccgtggattgatgaaaaaaattggtcaccgtcgtaacttattagcatacctacgtcgtacagatgttaaccgttaccgtgaattgattcaatcacttggacttcgtcgttaatagacaacagagtcaagtaaaaacactagaaaattttctagtgttttttgttttaaacgcactatgaacgtaagtactttgaggaggccagcagtaagaaagtgttttaacctatgaagagggttattaagcaagctaagattaaccctagaaatttattttaatcattgtaacaaggtctgattgctagtattaataatcagactttttacgtttacattaatgaatgataatacagcttcctccacggattttcgctactcaattttatagaattatgttagaataaagcttatacgtggttttatgcaaagttgagtttagaacagctagattgaactttgtaggaaacgcgtaaacaaaaaaatatggagaataatatgtcaaaacaagtctttgaaatgatttttgctggaaaaaaattagttgttgaaactggccaagtggctaaacaagcaaatggatcagttgtcgttcgttatggagattctactgtactcacagcagcagttatgtctaagaaaatgtcaacaggtgattttttcccacttcaagtcaattacgaagaaaaaatgtatgctgctgggaaatttccgggtggctttaacaaacgtgaagggcgtccaagtacggatgctaccttaacagcacgtcttattgatagaccaatccgtccgatgtttgctgagggatttcgtaacgaagtacaggtcatcaatactgttctttcatttgatgaaaatgctagcgcaccaatggctgctatgtttggttcatcattagcattatcgatttccgatattcctttcaatgggccaattgctggagttcaagttgcttatgttgatggtaattttattattaatccgacagcacaagaacaagaggcttctgcgttagaattaacggttgcaggtactaaagaagcgattaacatggttgaatctggagcgaaagaactttcagaagaaatcatgctagaggctcttcttaaaggacatgaggctgtctgtgaattaatcgcctttcaagaagagattgttactgctattggtaaagaaaaagccgaggtagaacttcttcaagttgatccagaacttcaagcagaaattattgctactcataacatagctttacaggctgcagtacaagttgaagagaaaaaggctagagaagcagctacagaagcagttaaagaagtagttataggtgaatatgaggcacgttacgctgaacatgaagaatatgatcgcattatgcgtgatgttgctgaaattttagaacaaatggaacatgcagaagttcgtcgcctcattacagaagataagattcgtcctgatggacgtcgtgtggatgagattcgtccattagacgcagagattgattttttaccacaagttcatggatcaggtctctttacacgaggacaaacccaagcattatcagtattaacgttagcacctatgggtgaagcacaaatcattgatgggctaacaccagagtataagaaacgctttatgcaccactataacttcccacaatattcagttggtgagacgggacgttatggagctgcagggcgtcgtgaaattggtcacggtgctttaggagagcgtgcattagaacaagtccttccaagattggaggagtttccgtatgctatccgactagttgcagaagttttagaatcaaacggttcatcatctcaggcttctatatgtgctggaacgcttgctcttatggcaggtggtgtgcctataaaagctccagttgctggtattgccatggggctcatatcagatggaacaaactatacagtcctcactgatattcaaggattagaagaccattttggcgatatggactttaaagttgcgggtacacgtgaagggattacagcacttcaaatggatattaaaattgaaggtattacccctcaaattttggaagaagctcttgcgcaagctaaaaaagcacgctttgaaattcttgatgtccttcatggagctatcgcagagccacgtccacaattagcaccaacggcacctaagattgatatgataaaaatcgatgttgataagattaaagttgtcatcggtaaaggtggcgaaactatcgataaaatcatcgctgaaacaggtgttaagattgatattgatgaagaaggaaatgtatctatcttctctagtgatcaggctgctattgatcgtacgaaagacattattgcaagtttagtacgtgaagcaaaagtgggagaagtttaccatgctaaagtagttcgtatcgagaaattcggtgcctttgtcaacctctttgataaaacagatgcattggtacatatttcagaaattgcatggacacgtacagcaaatgtagctgatgttcttgaaattggtgaagaagttgatgtgaaagtcatcaaaattgatgataaagggcgagttgatgcttctatgaaagcattgttaccacgtcctccaaaagctgacaatcctaaaaaggaatcttaatatgacaagtacaaacgagttagacattagattgcgtgcttttatcaatgcaccggataattttttagatagtataggtcttgtgaatgccttgcaccactctacggtttgggcaagcaaggaaccctatgctattcaagtagatggtcaagaagttgttcctgtttttacggatattactgaccttaatcatttcaaagaggagcaagaaagtgctcgagatatgttttgggagagtcgtcgtagtttagacgttcttgatgaagctatttcacatggcttagcaggattggtctataatttaaaaaaagaaggcgattttgggaactcgactattttctactgtgaagatatggtgcaatttatgaataattacaccacaatcttaaatcagttgttaaatgaagataacattgttgccgatatcatggataaaacctacttggtacctgcctttgtccatccacgtgaagaaggtagttttgaccgtcttttccctacaatgtctacccccgaaggaaaaagttatgttccagtattctcaaaccttttaagttttgaaaaatggtataaccataatgattttggtggtgcttttaggaaagcacaaggagtaattttagcctggacgattgacgatatttataaaccgcgtaatggagaaaatgagattgatgatacctttggagtagccatcaatccatttgatgaacaacaagttttagttgattggtctgatgtagaaaacgattgaggataactatggggtggtggaaagaaagtatagctattgtcaaagaacaagatccagctgctcgtagttctctagaagttattttaacttatccaggaataaaagctcttgcagctcataggctatctcattttttatggaatcataattttaaattgttagcacgtatgcacagtcaattttggcgtttctggacacaaattgaaattcatcccggagcgacgatttcggaaggggtttttattgaccacggttcaggattggtcattggagaaactgccattgtagagaaaggtgctatgctataccatggggttacattgggtggcacaggtaaagacaaaggcaaacgacacccaaccatacgtaaaggagcgctaatttcagcacattctcaaatcattggtccaattgaggttggagaaaatgctaaagtcggtgctgcagcagttgtccttgcagatgtgccagcagacgtaacagtagttggtgttccagctaaagttgtccgtgtccatggtcaaaaggatgatcttcaaatccgaagtattgaacatgatcgagaagaaagttattattcgtccaaactttaggaggtatttgtgaaggattatgtaacaactcaaatattatcaatcttaggtatactagcagcagcttgtttaagctatttaaagtttgcacaaggtaaccctctcttaggaattatttgggctgcttttgttttaatgtatgttgttcgtttgtataaagcttatcaaaaacagaaaaaggaaaaaccatgataaaaatttacgacactatgactcgcagtttacaagattttatacctctcaatgaaggtaaagtcaacatgtacgtctgtgggccaacagtttataactatatacacatcgggaatgcccgcagtgtagtagcttttgatactattcgtcgttattttgagtattgtggttaccaagtcaattatatttctaactttactgatgttgatgataaaattataaaaggtgcagctgaagcaggtatggatacaaaatccttttcagataagtttatttcagcatttatggaagatgttgctgcattaggtgtcaaacctgctacaaaaaatcctcgagttattgactatatggatgagattattgattttgttaaagttttagttgataaggaatttgcctatgaagctaatggagatgtttattttagagtaagtaaatcacatcattatgcaaaattagccaataaaactttggaagatttagagattggtgcaagtggtcgtgttgatggtgaaggagagattaaagagaatcctttagattttgcactttggaaatcagctaaatctggggaagtctcatgggaaagtccttgggggaaagggcgcccagggtggcatattgaatgttctgttatggcaactgagatccttggtgatactattgatatccatggtggaggagctgatttagaatttccacatcacacgaatgagattgcacaatctgaagctaaaacaggtaagacctttgcaaattactggatgcataatggttttgttaacgttgataacgagaaaatgtctaaatctcttggtaactttattactgttcacgatatgttgaagagcgttgacggacaagtaatacgttttttcttagcgacacaacagtatcgtaaacccgtgaatttcactgaaaaggccgttcatgatgcggaagttaaccttaaatatttaaaaaatactttcaacttaccaatccaagagaatgctaatgatgaagaattagagcaatttgtgaaagcatttcaaggagcgatggatgatgattttaatacagcaaacggtattactgttatctttgaaatggcaaaatggattaattcaggacactatacttcaagagttaaggaaacctttgctgaattattagaaatttttggtattgtattccaagaggaagttcttgatgctgatattgaatctttaatagaacaacgtcaagaagcacgagctaatcgtgattttgcaactgctgatcgtattagagatgaattagcaaaacaaggaattaaattgttagatactaaggatggcgtgaggtggactcgtgattgatgttcgtttgattaatggtattgctttagcttttgaaggagatgcagtttattctttgtatatccgacgccatttaattatgcagggttttaccaaacctaatcagttacatcggaaagcaacccaatatgtttctgctaatgcccaagcattgttaattaatgccatgttagaagaaaatattttaactgatgaagagcagttaatttataaacgaggacgtaatgcgaatagtcatacaaaagctaaaaatgctgatattattacctatcgtatgtctacaggttttgaggctcttatggggtacttggatatgactggtcagataaagcgcttggaaactctaatacagtggtgtattgaaaccattgaaaaataaacaaaaagagaggctatatcctctcttttttatagagacattaggatttgttggtaaaatattgctataaaaagctttatgctatagcattcatgatataatatgactatgaaagataaacaatttaaagaagaatcaagtgaccttgtctatggcttacatgctgtgacagagagtttaagagctaatactggtaataaattatacttgcaagatgacttaagaggaaagaacgttgataaagtcaaagcactagcgactgaaaaaaaagtatccatttcctggactcctaaaaaaaccttatcagacatgacaaatggtggagttcaccaaggattcgttctaaaagtttcggaatttgcctatgcggatttatcagagataatgacaaaggcagagaatgaagaaaatcctctcattttaatccttgatggtctgaccgaccctcacaacctaggttctattctacgcacagctgatgcaaccaatgtaacaggtattatcatccccaaacatcgttctgttggagtgaccccagtggtttcaaagacatctacaggagctgttgaacatgttcctattgcaagggtaactaatctcagtcaaactttggatactttaaaagataaggagttctggatatttggcactgatatgaatgggacaccatcgcataagtggaataccaaaggtaaattagccctagttattggtaatgaaggaaaaggtatttctcataatatcaaaaagcaagtagatgaaatgattacaattcccatgaatggtcatgttcagagtttaaatgccagtgtcgcagccgctattttgatgtatgaagtatttagaaaccgcctatgaaaaaacattctatcttactcgttgatggctacaatatgattgctttttggaaagatactcgacagctttttaaaagcaatcgtttagaagaggcaagggaagtattacttagaaagctaaatcattacgcacatttcgaacacattgatattatttgtgtatttgatgcacagtatgttcctggtgtacgtcaacgttatgaccaatacaaaatatccgttatctttactgaggaggacgaaactgcggatagctatattgaacgagcagcggcagaacttaatcaatctgtgttaaatttagtctccgttgctaccagtgatttaaatgaacaatggactatattttctcagggtgctttacgtgtctcggctagagaattggaacagcgtgtagcgacagtaaaatcagatttggataagatgtccagtcaaatcgatttgagtacgccaaagttaaggccgtggaatgatgaacaactaggaaaactcaaggattttttagatggtatgtaaaacctaacactttattagccagccaacaatttttttgatataatattggaactactttgattatcaaataaaaataatagattgaggtaacaatgacttttaaaatactaacggattcgacatcggatttagatgaaaagtgggctcaagagcacaatgtcgatattataggtttaaccattgaacttgatggaaagacttatgagacagtcggagacgaaaaaattactagtgacttcttgttggagcgtatgcaagagggagcaaagcctacaacaagccaaattaacgttggtcagtttgaagaagttttttcaacctatgcagaaaatgaccatgccttgttatatttagcgctatcttcacatttatcaggcacttaccagagtgcaactattgcgcgtgagatggtcttagacaaatatcctgatgctcaaattgagattgtggatacgatggcagcttcatgtggtgagggtgtcttagcgatgttagcaactaaagagcgacaagaaggtaaatctttagaagaagtgaaacaaaaaattgaatcacttctccctaaattaaacacatactttttagttgacgatctcaaccatttaatgcgtagtggtcgcttatcaaaaggtgcagctatcattggaagtgttgctaagattaaaccattacttaagttagatagtgagggtaaattagtaccatttgccaagacaaggggccgtaaaaaaggtattaaagagattgtgactcaggcaacaaaaacactatcttatagcactttaattattgcttatagtggagagaaagattcagctcaagttatgaaagaacagttattagcagatgagcgtattgaagaagttattattcgtccattagggccagttatttcagctcatgtgggctcaggtgctttagctctattctctttaggggaagaaaaccgataacaaatcaaagggcataacagtacgttatgttcttttagtatacattttataaaatgtattttatatgatgctatgaaactataaaatagtaggagacctattataaaaaataaaataagaactatcctcaatatgataaacgacaacaacaattggttttacaaagttatcaaaaatgtttttagacgatggtttttatcttatggcttgaaagtgtttttggaaagctaataaggggagtgtgttacctgattttataataatattaactttatttagtggtatttctattttgttacgacttctaatctaaaaagcgtctctccgtttgttgatgaaagtttttggaaaatgtttttgttgctggcgcatttgccctcataggaataactattttattgatgcttttactaggaaggttgatattgctacttatttttcaaggggagatgatgcaattttagcagttataggaatatcattgatagctatgggaatttcagtgtactaccataagtataaggacagatagtaatatgaaaaatttacgcttaaagacggctagagctagtatggatttattataacagtctctagctgaaaaggtcggtgtatcatgtcagacaatagccgccattgaaaaaggagactataattaagcgattaaattgtgtcaagctttgaataaaactgtagatgatttattttgggatgaaaattgataaaataaaagaaataacttgacgaatgctaccttattttgatatgattataagcggtattgtttaccccatttgtaaggccccggaacctttcaaatactctcgtggaccggaacatccacacctgtaaacaaaaacgaattcgtataggagaaatcatgaacaaaacaactttcatggctaaaccaggccaagttgaacgcaaatggtacgttgttgacgcagcagatgtacctcttggacgtctttctgcagtagttgctagcgtacttcgcggaaaaaacaaaccaactttcacaccacacactgatacaggtgactttgtgattgttatcaatgctgaaaaagttaaattaactggtaaaaaagcgtcagataaaatctactacactcactcaatgtatccaggtggtttgaaacaaatctcagcaggtgaacttcgttctaaaaatgctgttcgtttgattgaaaaatcagttaaaggcatgcttccacataacactcttggacgtgcacaaggtatgaaattgaaagtatttgttggcggtgagcatacacatgctgcacaacaaccagaagtacttgatatctcaggacttatctaagaggaaaggagcattatataatggcacaagcacaatatgcaggtactggtcgccgtaaaaacgctgttgcacgcgttcgtttggtcccaggtactggtaaaattacaatcaataaaaaagatgtagaagagtacatcccacacgcagaccttcgtcttgttatcaaccaacctttcgcagttacttcaactcaaggttcatacgatgtttttgttaacgttgtaggtggtggatatgcaggtcaatcaggtgcgatccgtcatggtatctcacgtgcacttttagaagttgacccagatttccgcgattcattgaaacgtgctggacttcttacacgtgacgcacgtatggttgaacgtaaaaaaccaggtcttaagaaagctcgtaaagctagtcagttctcaaagcgttaaaaactgctttacatcaacgattacaagcattttgcaagtctcttgcaaggtgctttttttgtcgttttttgcttttgataccttttttgataccgtttcggaaaaacttctccatcttttttgactgttattttgcttttagatagtccgcaaattgtttgactgacctatcttctccagtagttgtcgaatgactgtaagtatctaaggtcatttgactacttgcatgccccagtctttttgctgtgttgactgggtcaactccaatctcaatcatcaaggtagcatgagtatgtctaaaaccatgaggactgattttctttaacccgtgttttctgataatccgtgataggacgttgttgatatagtctgcatgtagtggctcaatagagcctgaccgtgtacaataagtgaagagaaaatcttgctcgatagaaagaggtgcaactgctagttgtgccttttctttttggctgatggatttccattcttgcagaatagaaatagtttcgctatctagcttaatctttcttactgagaaatcatttttagtgcctttttcgattgcctgtccgtctaatcgtcctaagctcttatcgacacttagtgtctcagtttgaaagtctatatctgcccacttaagagcgtatagctcgcctttccttaagccactgtaagctagtaatctaaatagtgcatagtgtttgtaaggctcttcctgaaggacaatggctaggaactcctgaagttcttgaaccgtccaatagttttctatccgtgtctttttccgttttggcataatgatttctgccatagggttatgcttaagcagtttcatcttgatagcaaaatcaaagaccttcccagtataggacttgatttgcttgatattcttaaaggtctttgctttatctgtgatgaagttctggcagtctaaaggggagattttgctgatgggtaagtctcccataactggcagaatgtgaagtcgaaacatatcaagagtacgtgaagcagttgttggctctaccatatcttgataggcttgataccatttctcgaatatctcgttataagttttatgagttggtttgatgaactcttccaactttcctgaagccttaagataaatgagtctggcttcgtagtctttggcttcctttcgagtacgaaagccacgtttgatatggtctgcacgttgactgtctttgaccatatagattttgacaaaatacaaatagccatttttggcttttttgcttgggtatttgtgaatggacattgtaatttctcctttatttttctaaggtttcggagcttataaaataaagaaattacgttgcctattatttttttaaaagttctaatctctcttttacttctttatcaagagtttttcgaagatttttagcctctgcttcaagttcatcaattttctggttaagcttgattttttcttgcttaatttcctcaagtctgtcacgtatgggagagttgaaaagagtttttttgctaactttttcaagggtttcaagagtagaaaaataatcttgacccatatcctttttgacttgttcaaaaaaacttaataaatttgtatctttgattgttgaatttgctatttttgaattgttatcaagccctagtaagtaagggatagatacaccgaaaaaatcagctaatattttagaattttctatgctaagactagtttttccgttttcatattttccatattgagattgattagtattgatgactttagctagatcagcctgagttaaccctttgtcttttcgtagttcttttagtctattgtacattattccctcatgacttttattgttttatataaagcattatatcacaaataatcaaaatttaacttttttcttgacataagttattttttaacttaaaataatagttataaaataactttttcggagtttataaaatagagaaaggggtcagttatggcttacacactagaagaacgagaaacgattgtccgttatgatgaaatggataactgttggtattttgagagtaatgttaggaaacacattactaaaatcatgaaaactattgatagttgtcagattttaggtcaagagaaagaagacgaccgcattatatggattcatgctaaattgacaaatcttgatgattatatggtttctccatttgttcgaaaacgagttaaacgtgaaatgactgaagaacaacgagaggaagcaagaaaaagaatggcaagattacattctaagtctgaaatatgattctacaatcacaaataacagattaaaaaccttctcaggtatatttaccctaggaagatatttaaattctgaaatacttgattacaataagcgtttcagagcttaaaatcgattttaacaaaaaggagaactcaaaatgacagaaggatttaccattcagctccccaaagtaactgaaaagaagttactggctcgctatgacactatggttcaaaaagcaatagaaaaagcccttgaggacaaagagctatataagcctatggttcgtatggctggcttgtgccgttttttagatgtctcaacgacaactattgtcaaatggcaaaaggcaggcatgccacatatggttattgacggagtgactctgtacgataagcgcaaggtcgctcaatggctacaacaatttgaaagataggaaatttggcatggataaaaataatttagaagacttgacaggaaaaaagatacttagaaatggttttggtggtcttcgtttggaatatgggacaatctttcttgatgttggattgttcacttatattgtgctgatactatcaatatttttctttttagttgaacgttggtttttgggagctttaacttttgtgttgcatgttcccttgcttctacttgggatatggtgtggagagagataggaggtaagaactatggactatgataacgacagctatcttatcccgaaagttttactgcaagatgatttctacagtagtctatctgcgagagatattttagtctatgctgtcttgaaagatagacagatagaagctcctgaaaaaggttggatagatactgatggcagtatatatctaaattttaaactgattgaattagctaaaatgttttcttgcagcagaacgacaatgatagatattatgcaacgactggaagaagttaatttgattgaacgagaaagagtagatgttttttatggctactctttaccctacaaaacctatatcaacgaggtataagcaatgataaagatttattttggaaaagatataacacttaaccaagctattcagtcgcgattggatagctatcagattgactatcaagcattctcaagcaaagatatagatgctaaaacactgatggaatggctattcaggtcgaccgatatatttgaattactaagcactaagatgttgaaatacaagctgaatacacaaattaccctcagtcaatttgttcgaaagattttaaaagatgtcaatagcaccttgaagcttcccattgttgtgacagatgaggttatttattcgaacatgtcccctgactatgtgacagtactcttgccaaaagaatatcggaaaattaaaagaattcagctgatgaggaagatggagcagttagatgagggacgtctattctggaaaaactttgagtcactacgtaagcaatctgagctacgttggtttgaactgaatgagttactgtttgctgatatgtccgacgatttaggagaaatcaaaaaagctaaagaccgtttctttagctacaagaaaaataaacaggttccgcctgatgacattatcgaaaaaatcctcaagatatttttggttgaccgagaagactttttcaaaaaatctgtgttggattgacaaaatttctagtcaaaaatatttatgaaaataactatgaaaatattttgaaaacagagatttgaggtcagatttattggggttctgaaaaatttataacagggcgccctctaacagcccgctatgtgcacatctgaagtgcatttactacacccgttttttggcaagtttggctggagcaaaatgaaaatggtccgactccgaaggggtcggcttggggctactcccccaagaatgtcattttacgtaggcctttgcgcagacaaaaaaatcggcgccgttaggcgaccgccaaaaagaaaggaggtttgtttgaaattaaaagtcagcttagacaatatcactatgacagcctatatcaaatctaaaaagtatttagctatgaaacaactcatagaaacccatttagctattactgttcaaactgcgatgactgacatgtttcgagccaccactggggatggaatccacgttgtgctccatatgaattatgacaaacaaaaaggacaagaccgcaaggctcgtccatttcgcttggagtttaatcccaataaactccgtttagttgacagtgaaattatagatactattataccatttcttgaagatatttcaatatcacgtgctgatttagcttttgatctatttgaggttgattgtagtgagtttgtgctcgaaaaaaagggcagaccaaccgcaaccaaggaatttcgttctagtactggaacgttagaaacaaaatatctaggtgctccacgttctgaaaaacaagttaggctatataacaagaaaaaggaacaactccaaaatggtactgataaagataaagactttgcaagtcaatttaagcactggtggcgcttggaatttcaattaagaagccgttcaattgatgagatattcgaggttattgatactattatttttaaaccattcaatcttaaaggcttatctattgagacccaaatctatctaactgctcttattcacgataaaaatatctggaaaaaactccatagaaatacaagagcaagatacaaaaaaattttagaaactcatcaaacatcagatactgattatttaggtttgctgaaagacttgttgaagcatgaaagaccaagactagaaaatcagctcgcttattatgggggtaggatagacaaaaatagctttcaacccttttgttgaaaattcagtattatcaaggagttacgaggtcaaaaatgagaataaaagattatgctgatagtctaggagttagtagccaatctatctataaacgcatacgctctccaaaatataaagaaaggttgaaaggtcatttataccgagacaaccaaaaggttgaaaatcttgatttgataggcattaaaatacttgaagattatcattttgagaatgatgtcattgaactggaaaaaacgctgggtgatattcaagaagaattcgagcaagaaaagaagggaatgcaatatcggatagatagactagctgataagttaactcctttacttgaggataaccaaaacttggtacaaaaaaattatgagttactcaactatgttcggagcttggaacgacagaagctattgctgattattgctttagctgtcatggtaatcactttattagtggcaatatggcttgccatcttttgatggcaattgtcggacaatgcgaagcgtccgaccaagggcactgcttaagtgctctactcgcttcggcgagtataatcgaagctcctcttgtggctcgagaggtggttcgaagtcgctcctgtattcggagcgaagagctgtctgcaagacccttcggagaacgcacatttacgtagtaaagtgtagtgcgttacactttacatggaagttatgccgatcccctaagaagaaatccagataataggttgcttattcatggtggcaattaccgccaccatctcggcgaccttttgagccgagaaaggagaattaaaaatgagttatgttgttgctagaatggctaagtacaagtcaggtcagttgacggctatttataatcataatgaacggatttttaaaaatcactcaaataaagaaattgacgttgagaaatctcaccttaattatgaactgacaaatcgagaccaggcacaaaattatcacaaacaaataaaggagcacatcaatgaaaatcgcttatctactcgtggagtccgtaaagatgctatactctgtaacgaatggattattacttcagataaaacgttttttgactcgttagatgagaaacagacacgagagttttttgagacagctaaagattattttgctgaaaaatatggtgatgctaatattgcttacgctagagttcaccttgatgaaagtactccgcatatgcatttaggtatcgtgccaatgaaaaatggtaagttaagttcaaaagcactgtttggaaataaagagaaacttgtagcaatccaagatgaacttcccaagtaccttaatgagcatggctttaacctacaacgtggcgaaataggcagtaagaaaaaacatttggaaactgctgaatttaaagaaaaacaacgattactggataacgctgatagaaaactagctgataaacatgaagaattgaaagcacttgatgataagatttcaaatgttaacgatacaatagctgataaagaaagtaggcttaaagaattggaagcgaaagaatgggatgctgttggcgatttgaagcagtatgaattagagaaacagtcactagctgaaagcattgaagacataaaagacattgaactattacaacttgatagaattcaaaaagaagatttggtaaaacaaagctttgatggcaaattgaagatggataaagaaacctataatagactatttcaaactgcttcgaaacatgcatctagtaatgctgagttaaaaagagacttggttaaagcccagtcgcagaacaatcacctttctagagaattactcaatcaccgtaagacagctgaaaaaaatatcaaattaagtcaagaaaacagaaaattaaaggacaaagtaaaaatgcttgatgaacaagtgaaaattctgaataaaagcctctctgtttggaaagaaaaagctaaagaatttatgcctaaacaggtttatagagaaacattatcaatcataaacactctaaatcctattggtttagctaaaacagcaatcagacaagttaagaagatggttgatagtaatagttagctacttttatgccgtgaaagtctcttgataacaagctaggcaagtttagactagatggggtcgagtcgtcaggctaaagaactggcgaccgatcgccatagactaaaacagtctaggttacttgttgtcaagagaaccatggaataaatgagtaaggagaaattaaaatgacagataaaaaaattgtttattactttgaccatgacttatcaaaaaaagatatgggaggagtaggacctacctacaccggtaaaaatcttttattcctactttggtggacatattcttatgtggcagaagacaatttagacattgatacgtcattgtttgaagtcccagaattcaatgatttttacaataatggtctagagctttatcgtataaaaaatgaactagctaattacaatatcagatttggatatgaggttaatccaaaagatagtacaaagatgctgataggtattttgccaactgatgaagaagattatgttaagggatatagaaattttattgctgatatttccaatcctgacacacgttacgcaatctatcatcgactaattaaaaccatggacacaatgctaccgattgaacaaattaatgtttataaaagccttgcaaaaggtaataaaaagtgatagagtggaagaaagttgagactgagtttgaattggtaacaattcattcaaaaaatacttattgaaggtattaggtagaggtgttgcctcctgagtatacttaggtaaatccccgattgggttctcagcttttacattaggagaaggttgattgactggtaacagttttctcaaaggtattgtttgtcaatacagggttggctctgccttgtggaatatctactaaacagcccgaactaattttgctcctagttaatttgtaatcttcaaaaagccttggtattacgctaaggctttttgattgctatttaaacaatttcatatagtcgcttcgagtaggaagcaagtaatcaataacgaccctattctcttcctcctcgatatggtataggacaatataatctttacttaaggtataacctctagtgctgtggtacttactgatttttgaaccatatttttcatcggcatcaaaaccaacttcagggaaaacctcgagtttttctatgtcactaatgatttgctccattttgtgctgacctgatgtcgaggaatagttttgagaaatataatcacgaatttcctttaacttctctaaaacatcaggagcatagataatctgatatttcttatagtccaagttcagacctcacttcttcagaggtataaaatttcccttgacgaacatcttcaatatttttgttgatttcagcttgaaattgcttgaaaagtttttctttctctagctcctcttccgtcaataagtcaacctcatttgtgacaacgacattttgaaggaataatcttaaagcagatgataaggttaaatttttcttgtttaatactgtcattgcttcgcttaccaattctttgttagcttggaatgtgacagctctatttttttctgctgtaaccatattatgtaactcctttatttagtttatttaattatctcatatacataaaaaaagtcaataaaaaaatcccaattgattgagatagctttcgtttattttataagctccgaaactacagaaaattgatacctttttgataccgtttaggtttaaatatttgtctataaataagaatttcagtgattttttattttagaaacgttgattttaaagggatttgactttaaataatggagtgaaccaaaaaccaggtcttaagaaagctcgtaaagcttcacaattctcaaaatgttaatcagtacgattatatcaacgtttcaaagcactttgcaagtcttgcaaggtgttttttaaaaccttttgataaccctttctgttttgaaagtaaggtaaatgtaatataaatcgctgtttgtatttttaatagattaacctattatgagttttatctgtgtaaggaacatctaaatatgctatactgcagttaaaaaaatagggagcaaatgatgtcacaaattaaactaacacctgaagaactccgtatttcagcacaaaaatatacaacaggatcacaatcaattacagatgtgttaacagttttgactcaagaacaagctgttattgatgaaaattgggatggtacagcatttgatagctttgaagcccaattcaatgaattatctccaaaaatcacacaatttgcacaattattagaagatataaatcaacaattattgaaagttgcggatgttgtcgaacaaacagactcagatattgcctcacaaattaataaataattggcttattcaaattcataagtttaacttaggaaggcataagctctcctaagttgatatattatagctagatgatgtaattgtttcataaaggagtaaaaatgaaaaagagtacccaaataatactactaatagttgcattattcatacttgtttttagcggaggattttatatgaaagaacaacaaagaaaagaagaactaaaacggaatcgagaatatgaagttagtctagtcaaagcattgaaaaattcctatgagaatatagaagaaataaaaatcacacatcctgtttcaactgaaattcctggagattggcattgtactgtaaagatttcatttaatgataaaaaatctattgtttataatattacacataatttggaatcgaaaaaaaattatagcggaaaatttaatgaaaaaaatatgaatttttttgattcaagaattggtaaaacaaaaaaaactataaaaattattttttcagatggtcaggagaagatacaataatggtatttacatataccgagaaagaacttcgtgaattcaatattggagataatgtatattcagttaaccccgattatgcagaaaaaaatcattcaactgtcataacggatttaccccagaaagataacgaaacaaatattattacaacagaagatagaaaaaaatttaaggtattaaaaacttctcctgacgatatgtctggctatcagggtatggcagttgcaccaattatcaagggtaaagtagattataacagtgttgcagttatatccgccgcaacggattcaagtaattataaagatttaattggcgcagtttcatctgctcaaccacatcaaagttcgactcagttaaaatcagctgataaatttttaaaagacgtacagtcacatgacaaatggactgtgactcagctttcaggctattctcaatctgcatatatgttaaaattaggtgctcaatatcatatcccgactacagtatttaatggatggtttaggtatagcactttaaatgaagatgaaaaaaattcatggctaagcatcctgaatattttgtgaattttcgacataaagaggataatgtaacttggtggaacgattttaataaactagatgataaagattatggtaccgtgaaatgggtaaatggtaaaagtcataaaatagagagttggaaatttactgatgatggtaagttaaaagatgaaaaaggtaacatcgtaaatcctaagtcaccagctgttcagtctgttctttatgaagaagttcattttcaaaaagctaaagctaaattaaaaaaatctggaggcaaacttagtcatagtgaaaaagtatatttagattctgaacaggctatatttattgctaacggtttaaccacggcatctcaaacagcttctgatgatatcaagaagaatgctgaattagttaaagaaaaagcatcagaactatttgcaaaaactaaagtgatgcctcctggtataacagatttaagtccggaagaattagctgatacatatagtgagggcggagttagagaggacaccatagtaacaccaattgaaactttctttgatgaaaaagttactaatgcacaagagattacaacttcatatattaatcttcaaaaacaaattgaatctggtgtccaaaaattgctagaagaggactccaaattagcaggagaatttaaggaatggtcacagtactagatcaaaatgaaaacaaaattaatagtctaaaaataaacctagggaaattggaagataattatcatcgcgaaaatatggagatagaagataaattatatagccttgaggataaaaagaacgagttagagacttatttacaagaagtctatgaagagacaagtcaccttttgagacaaaatgattcagatggttcgacttttatgagtttaaatcgaataattgaaagttatcaaatggaattaattgatgaatatgaaaactataaacagactatcattgtccaagaggaaaatagtcggacacagtttctaaaagaccgagtaaaattagaaaatgacatttctagtttagaaggaagaaaatactactaattcagatggactataaagtgaaagaggcaataaatgagtttaataggcgctgtattgaaaggaaccaaagaagacaaagaattcaaaaagcaaattcaaagagctttagtaaggattgtctatgcccctgaaatagtagaagaagctgattctattaagatgacttatagtgacaagattgataatgtttctgagacggccaaatcatcaattaaaacgatagcaaatcaaatagattcaggacttgtaggacaatttggggaaaaagtaaaggcacaggtagatttaaataaaggtagttatgatgatttataatcgagtgaaaatgttgaggaagcttactatcctgatagttattatagatatgaaaataatcaagttggattagaagacataacattttacatgaaggataacaaagtttattatttacattttggtaaagcaatagataaaaatgaagctaaaaatgataagtatctcaatcaaattataaataattaatttctttattttataagccccgaaaacaaattttttgataaccttttgataacccctccgcgaacatattgtaatacatagtgcacttttgggatataaattgttgatttttagctagtttataccatataacaccatatattacagttgtcagagaaaaccaggtttaaaaaaagcccgtaaagcatcacaatcctcaaaacgttaatatatacctatatatcagcgattggaagcacttcatggttcacaccatggggtgttttttgtgtaatattcaaaaattgtcctaaagtcatttttaaaacttctaaatacttgagaaaccattgtaaatttaaataactactttaaatagcacaaaggcaatgacaaagttagatgagatgattctattttaatttataattgaaaaaaagagtatatgatggaggaattttgtatggtaagtactcaatatatgaaagtaaccttacgagaaaaattcccagataaattaacatatgttgatttagaagaacttgtgatatgatattacaaataaaagaaaatgactatatatcagctcatatattggttaaagttggtaaatataaattattgaaattacctcataagtttaccaatgagattacggttagaaaggaatactaatgtttaaatatgtccctatttttagggaatttcgacttaatcgacagttttctcttaaacaggttgcttcaaatgaactttctgtttctcagttatcacgatttgagaggggtgaatcagatttatcattaacaaaatttttaggggctttagaggcaattgatttatcaattagcgaatttatggatagagtaaataaatatcaaaaatctgatcagatatctttaatgtctcagatggctcaatatcattatcaaagagacgtagctgggttagaaaagatgatttctgtggaagaaggtaaactaaaaaaggatagttcagatatacgttgtcgtttaaacatagttctttttagaggaatgatatgtgaatgtgactcctcaagaaaaatgtcggaagaagacctttgctttttgtcggattacctctttcaaaaggatagttgggaaattagtgactatattttgattggaaatctttaccggtattacaacacaaggcatatttgccaacttgttaaagaggttatcaatcaaaaggaatattatcgagatatttatacaaaccgcaatgttgtcgaagcaaccctcctaaatgtggtagagacactaatagaacggcgcgctctagaagaagcaacgttttttctagagaaagttgaagcacttttaaataatgagcggaatgcttatcaccgtattattttactctatgaaaaaggatttcttgcctatgctaaaggggatagtcgaggaatacaaagcatgaagcaagctattttttgcttccaagcaattggttctaaacatcatgttgaaaattttcaggaacactttaatagggtaacaagattataaaaaatcccatttatgggattttttaatatttctccttttggtttgctataatgtcgaactaaggagggaattatgaatattaatggtataaaattactatctagtcgagcagtcagtaaacttggtgatgtgttttatgattatggaaatagtacttggattgcttcgatgggtggtctaggacaaaagattttaggtatttatcagatagtagagttgttggtttctattgtcctcaacccttttggaggcgccttagctgatcgctttcaacgaagaaaaattttactaataacagatgctatctgtgctatcatgtgtttcttactttcttttattggagatgataaagtaatggtgtatggtctaatagttgctaatgctatcttagcggtttccaatgctttttcttctccggcttataaatcttatattcctgaaatagtagataaagctgatatcattacctataatgctaatctggaaaccattgtgcaaattattagtgtaagttcccctgttttaggtttccttatttttaataattttggtattaggattactttaattgttgatgcgattacttttttgatctctttcctgtttctttatgctattaaagtggaaagggtacagctttcaaaacaagaaaaggtagcgataaaaaatattttagctgatattgcagatggatttacttacatcaaaaaagaaaaagaaattatgttttttctaattattgctgctttattaaacactttcctagcaatgttcaattatcttttaccttttactaactccctattaaaaacttcaggtgcttatgcaacaatacttagtatatcagctatcggatcaattattggagcgcttattgctagaaaaattaaatctagtattaattctatgctatctatgctagtattcagtagtttgggagtcatagttatgggattcccatctctatttgaattaccgatatggataccttacagtggtagttttctttttaatagtcttctgacaatgtttaatattcattttttcagtcaggtacaaatcagggtcgatgaagcgtatatggggcgtgtgatgtcgactatatttactattgctattatgtttatgcctataggaacactatttatgactatcttttcatttgccttatcaaatgttagctttattgttataggatgtgccattgctatattgggaggattaggatttagctatagtaaaaaacaattttagaacttaagaaattattctgaaacatcaaaaaaacttgtctctactgacaagtttttaatagttattttcttggttcaagcatgcgttggataccgcctaggattaaatcagagaaaattgccataagggctgttggaagagatcctgctaagataatagcaccaccatttgttgcattagttcctcttatgatgatatctccaagtccgcctcccccgacgaaagcaccaatggctgtaataccaattgctacaacaagggcatttctaagtccagccatgataacggaaatagatagtggtaactcaaccataaataaacgttgacgcttagtcatgcccattcctttagcagcatctagtaagtcggagtcaacatttctaataccagtgtaagtatttgtgatgattggcagaagagaataaagaaagacagttgcaactactgttttaatacctagccctagacctaacataatgatagagatcatagctaaagaaggaatggtttggatgacatttgcgattcccataacaaaggttttaattttaccacgtctagcgatgaagatacctagagggataccaacaattgcagctaaaataacgccgtaaactgaaattaaaaagtggtggataaattgttctaagatataactaccattatgttggaagtagtagataaattgttggaaagtattcatttgtttcatttatttatctcctctaaaataatggtttttttctaaaaattgtttggcaacaactgaaggttctaaaagtttatcatctaccatataattaaggttttgcatcgtttttaaattgattttaccatcgagtcgatggagtaatttttttagtttaggatcttttttgatgatagaattgttgacaaccatagaggcttcataaggaggaaagaattttttatcatcccttaaaatttctaaatcatagctcgaaatacgaccgtcagtggagtagcctaatacagattgcattttgttactttcaaccgcatcatagactaagccaatttgcatagggtaaatatgtgaaaattcaaaaccgtatgttttagcgaaatcagtgtatccatctccctcgcgattcatccatgaactatcaacccctgccttcatagttgttgataattttttaagatcagagatcttagtgattttattctgtctggcaaactctttagtaaccatgaatgcataagtatcagaaaaaccataagtaggataccaagtttgattgtagcgtttttggaattcagtttttacaatcttagaagcttctttagggtctttaacagcttttaaaccaagagtccctgtgatgtctgttcctgtataacgtgtggcagcaatgtcagcatcaccacggagcaaagcttggtgagtaaccgtagaggaaccaagattgcttattaaagttgtgttgtatcctaattcgtgatgaattaattcggtgataatatttgccataatactagactctgtagaactttgggcagcaaccttaattgtggtatgaccagactttttagtatcggttaattgacaaccagaaatcgttaagagggctaagcaaagtgtaaatatctgtaaaaagtgcgattttttaagcatatctaagcctcccttcttgttgttctgggcgttagagctgtttccagtaatcctaaaagataatctataataagtgacaggataataacaggaattgtgccccctagaattaatttggactgaaaaagatttaacccgctaaaaatgagatcaccaagtccacctgcacctatataagaagccaatgtagcccaagcaataacataaatagtagacaagcgaataccagccataataattggagtagctaaaggtaactcaacttgaaatatagattgaataggtttcattcccatccctttagcacaatctttaagtgttggattgacattattcatacctatataagtattccttagtataggaagcaaggaataaataaataaagcaacgatagctgggatttttccaattccaaacaatggaatcattaaagctaataaggctaaacttggtatagtttgtaacatgctagctatagcaatgataattttggctactttgggaaaacgtgttaagaccacacccaatggaacagcaattgcaatcccaagtgctatagcaaagaatgagatatagacttgttcccatgtttttactaatatttgcatgccatactgtgataagaaattgaccattattgatcctccgtttcagtatcgccccaaataatatcgtataacatatcaactagggatgcacgagtaacaatgccctttaagttattctcatggtcaacaactggagcgtattttaaaccaagttttaaaatacgctcagcagtatttctaagtaagtcgtcttccataacataaaaatcagtatgttttaagatatcagaaacaagtcgatctttcttatatttactgcttagagattctaagtcaataaaaccaattaatttaccgttatcggttactagaagtgagtcaacgcgtttttggcgcattagtgtaatagcttcagttagtgttttttcagcagttattgaaacaggattatttaacattatctgtttaacaggagtaatatcagcctgcgcatgaaggagacgctcttctccaatcatttgttcaacgaaactagtagcaggatgatgtaagagatcattgggtgtcccttcttggaccattttaccattgtccataacaataatttttgttgctaacttgagggcttcatccatatcatgagtaactaagatgatagttttccccatttcttcctgaagagacttgactaagtcttgaataccttctctagtaataggatccagagctccaaaaggctcatccattaaaataatatcttggtctgctgcaagagcgcgaatgacaccgatacgttgttgctgaccgccagacaactcactagggtagcgatccaaatattcttcgggtaattcaactaatttaataagttcccttgctttagctcttttagcttcttctgaccatttcaataattttggtacaagaactatattttcgtaaatggtcatatgaggcattaaaccaatgttttggataacatatccaattctgcgtcttaattcaatggggttaatagtagaaatatcttttcccttaaataatagagtaccatttgttggttttaacatatggttaaccatacgcattaatgttgttttacctgatccactcgtaccgatgaaacaaacaaaatcaccagggtaaattttaaggttaatgtcttcaaccgcaacattttccccatacactttattgatattttgatattcgatgataggttcttggcccatattattctcctctacaaactatattatagtaataatatcaaaactttggcaacatgtctgaaatttgttttaaaatttaatgattttaaaaagaatcgttaagcttgagcctgatctacattttcagaaaatgtagaaaaagtatgaaaaaagagttgacaaagtaagagatgatgtagtaaactaaataagttgtctcgagagagcagtttctattagcgcgtagttaacaacttaaaaaaagtagttgacaaagcagaataagtttgctagaatatagaagttgtctcaagagaggcaaagacctttgaaaactgaacaagacgaacgaatgtgcagggtggatttacattgtaaatccgtcaatgacaaaaaaacaataaatctgtcagcgagacagaaaagagcaaagctcaaacttttaatgagagtttgatcctggctcaggacgaacgctggcggcgtgcctaatacatgcaagtagaacgctgaggtttggtgtttacactagactgatgagttgcgaacgggtgagtaacgcgtaggtaacctgcctcatagcgggggataactattggaaacgatagctaataccgcataagagtaattaacacatgttagttatttaaaaggagcaattgcttcactgtgagatggacctgcgttgtattagctagttggtgaggtaaaggctcaccaaggcgacgatacatagccgacctgagagggtgatcggccacactgggactgagacacggcccagactcctacgggaggcagcagtagggaatcttcggcaatggacggaagtctgaccgagcaacgccgcgtgagtgaagaaggttttcggatcgtaaagctctgttgttagagaagaacgttggtaggagtggaaaatctaccaagtgacggtaactaaccagaaagggacggctaactacgtgccagcagccgcggtaatacgtaggtcccgagcgttgtccggatttattgggcgtaaagcgagcgcaggcggttctttaagtctgaagttaaaggcagtggcttaaccattgtacgctttggaaactggaggacttgagtgcagaaggggagagtggaattccatgtgtagcggtgaaatgcgtagatatatggaggaacaccggtggcgaaagcggctctctggtctgtaactgacgctgaggctcgaaagcgtggggagcaaacaggattagataccctggtagtccacgccgtaaacgatgagtgctaggtgttaggccctttccggggcttagtgccgcagctaacgcattaagcactccgcctggggagtacgaccgcaaggttgaaactcaaaggaattgacgggggcccgcacaagcggtggagcatgtggtttaattcgaagcaacgcgaagaaccttaccaggtcttgacatccttctgaccggcctagagataggctttctcttcggagcagaagtgacaggtggtgcatggttgtcgtcagctcgtgtcgtgagatgttgggttaagtcccgcaacgagcgcaacccctattgttagttgccatcattaagttgggcactctagcgagactgccggtaataaaccggaggaaggtggggatgacgtcaaatcatcatgccccttatgacctgggctacacacgtgctacaatggttggtacaacgagtcgcaagccggtgacggcaagctaatctcttaaagccaatctcagttcggattgtaggctgcaactcgcctacatgaagtcggaatcgctagtaatcgcggatcagcacgccgcggtgaatacgttcccgggccttgtacacaccgcccgtcacaccacgagagtttgtaacacccgaagtcggtgaggtaaccttttaggagccagccgcctaaggtgggatagatgattggggtgaagtcgtaacaaggtagccgtatcggaaggtgcggctggatcacctcctttctaaggataaggaaacctgccatttgcgtcttgtttagttttgagaggtcttgtggggccttagctcagctgggagagcgcctgctttgcacgcaggaggtcagcggttcgatcccgctaggctccattgaatcgaaaggttcaaattgttcattgaaaattgaatatctatatcaaattccacgatctagaaatagattgtagaaagtaacaagaaaataaaccgaaaacgctgtgaatatttaatgagttttctagttttaaagaaactaggttaataaggttaagttaataagggcgcacggtggatgccttggcactagaagccgaagaaggacgtgactaacgacgaaatgctttggggagctgtaagtaagcgctgatccagagatgtccgaatgggggaacccactagttaatgactagtatccatatctgttaaggatatgagaaggaagacgcagtgaactgaaacatctaagtagctgcaggaagagaaagcaaaagcgattgccttagtagcggcgagcgaaacggcaggagggcaaaccgaagtgtttacacttcggggttgtaggactgcgatataggattaatcattatagaagaattacctgggaaggtaagccaaagagagtaacagcctcgtatttaaaatgatagattaaccttagcagtatcctgagtacggcgagacacgcgaaatctcgtcggaatctgggaggaccatctcccaaccctaaatactctctagtgaccgatagtgaaccagtaccgtgagggaaaggtgaaaagcaccccgggaggggagtgaaatagaacctgaaaccgtgtgcctacaacaagttcgagcccgttaatgggtgagagcgtgccttttgtagaatgaaccggcgagttacgatatgatgcgaggttaagttgaagagacggagccgtagggaaaccgagtcttaatagggcgtcatagtatcatgttgtagacccgaaaccatgtgacctacccatgagcaggttgaaggtgaggtaaaactcactggaggaccgaaccagggcacgttgaaaagtgcttggatgacttgtgggtagcggagaaattccaaacgaacttggagatagctggttctctccgaaatagctttagggctagcgtcgatgttaagtctcttggaggtagagcactgtttgggtgaggggtccatcccggattaccaatctcagataaactccgaatgccaacgagatataatcggcagtcagactgcgagtgctaagatccgtagtcgaaagggaaacagcccagaccaccagctaaggtcccaaaatatatgttaagtggaaaaggatgtggggttgcacagacaactaggatgttagcttagaagcagctattcattcaaagagtgcgtaatagctcactagtcgagtgaccctgcgccgaaaatgtaccggggctaaaacatattaccgaagctgtggatgacacaaaagtgtcatggtaggagagcgttctatgtgtgaagaaggtgtaccgtgaggagcgctggaacgcatagaagtgagaatgccggtatgagtagcgcaagacaggtgagaatcctgtccaccgtaagactaaggtttccaggggaaggctcgtccgccctgggttagtcgggacctaaggagagaccgaaaggtgtatccgatggacaacaggttgatattcctgtactagagtatatagtgatggagggacgcagtaggctaactaaaccagacgattggaagtgtctggtcaaacagtgaggtgtgatatgagtcaaatgcttatatctttaacattgagctgtgacgaggagcgaagtttagtagcgaagttagtgatgtcacactgccaagaaaagcttctagcgatacatatactctacccgtaccgcaaaccgacacaggtagtcgaggcgagtagcctcaggtgagcgagagaactctcgttaaggaactcggcaaaatggccccgtaacttcgggagaaggggcgctgattttagatcagccgcagtgaataggcccaagcaactgtttatcaaaaacacagctctctgctaaatcgtaagatgatgtatagggggtgacgcctgcccggtgctggaaggttaagaggagtgcttagcgtaagcgaaggtatgaattgaagccccagtaaacggcggccgtaactataacggtcctaaggtagcgaaattccttgtcgggtaagttccgacccgcacgaaaggcgtaatgatttgggcactgtctcaacgagagactcggtgaaattttagtacctgtgaagatgcaggttacccgcgacaggacggaaagaccccatggagctttactgcagtttgatattgagtatctgtaccacatgtacaggataggtaggagcctatgataacgggacgccagtttcgtttgaggcgttgttgggatactacccttgtgttatggctactctaacccagataggcaatccctatcggagacagtgtctgacgggcagtttgactggggcggtcgcctcctaaaaggtaacggaggcgcccaaaggttccctcagactggttggaaatcagtcgtagagtgtaaaggtataagggagcttgactgcgagagctacaactcgagcagggacgaaagtcgggcttagtgatccggtggttccgtatggaagggccatcgctcaacggataaaagctaccctggggataacaggcttatctcccccaagagttcacatcgacggggaggtttggcacctcgatgtcggctcgtcgcatcctggggctgtagtcggtcccaagggttgggctgttcgcccattaaagcggcacgcgagctgggttcagaacgtcgtgagacagttcggtccctatccgtcgcgggcgtaggaaatttgagaggatctgctcctagtacgagaggaccagagtggacttaccgctggtgtaccagttgtcttgccaaaggcatcgctgggtagctatgtagggaagggataagcgctgaaagcatctaagtgcgaagcccacctcaagatgagatttcccatgattttatatcagtaagagccctgagagatgatcaggtagataggttaggagtgtaattgtggtgacacatttagcggactaatactaatagctcgaggacttatccaaaaagagatattgacaacgttacggtttcttgttagactatagatattcaattttgagtgaataaggctcaatagttaagtgataattgcctaggagatacacctgttctcatgccgaacacagaagttaagccctagaacgccggaagtagttgggggttgccccctgtgagataaggtagtcgcttagcaaagggagtttagctcagctgggagagcatctgccttacaagcagagggtcagcggttcgatcccgttaactcccatagaagcgggtgtagtttagtggtaaaactacagccttccaagctgttgtcgcgagttcgattctcgtcacccgctttactttataagaaagtaaaaaccaagcaatagcttgggcgcgtagctcaggtggttagagcgcacgcctgataagcgtgaggtcggtggttcgagtccactcgtgcccatcaagaatatggtccgttggtcaaggggttaagacaccgccttttcacggcggtaacacgggttcgaatcccgtacggactattttttgttatatggaggattacccaagtccggctgaagggaacggtcttgaaaaccgtcaggcgtgtaaaagcgtgcgtgggttcgaatcccacatcctcctttaaagatatcgcgggatggagcagctaggtagctcgtcgggctcataacccgaaggtcgtaggttcaaatcctgctcccgcaataggctcggtagctcagttggtagagcaatggattgaagctccatgtgtcggcggttcgattccgtctcgcgccatttataccttaggagagatagcgaagaggctaaacgcggcggactgtaaatccgctccttcgggttcgggggttcgaatccctctctctccatagtaaacgggcatagtttaaaggtagaactaaggtctccaaaaccttcagtgtgggttcgattcctactgcccgtgttttttctaatatggcgggtgtggtgaagtggttaacacatcagattgtggctctgacattcgtgggttcgattcccatcactcgccttttcatggggtatagccaagcggtaaggcaagggactttgactccctcatgcgttggttcgaatccagctaccccagttttaagatagccggcgtggcggaattggcagacgcgctggactcaaaatccagtgtcctcacggacgtgccggttcgaccccggccgccggtatacttataaagacaaggtttctaaaccttgtcttttttctactagataatttattgtgaaatgttacttgtaatatatatttatttttttcattgtagaagaatttatataataataaatattaattattaatttaattagggcatttaaaatatacaaatgattttctgtttacatgttaagactaaaactataaaaatacgtgaaaattttgttatactaaaattaattttataatgttggtgaataatagttaatttcattatatacttgatatataaaatttatattctaagaaaagagaacatgatgagaaaatatataaaatggttaattcccatatcaatttttgggatgatacttggaggctgtcaaatgaatagtgaacataaaattcagtcaaacgaagtaaaaaatagcaagcaatcagaagtgaagaaagataaaaaaatgacaaaaaaagaacaattagcctatctcaaagagcatgagcaagaaatcatagattatgtaaaattacataacaaccaaattgagtccgttcaattcgattggtcaagtgtaaaagtagaacaaagcgggaatggaactccacaagggggtgattataatctttcactgagaggaaagtttaatcatctacaaaattcaaaattaatagttgatttttatttagctcataaaaatgatatcccaaatatcaaatcaatgggaatgctaaataagccgtatatacataaaaatggtatttggcacatttatgaatagcttgaatcatcctatataaagtaatagaatttttaccacaagcaaggtagaggagaagaataattgagtaattggaacttagataattttgataacttacatagctctttagcagaaagtgcatataatagtcgacctaattcatttcctgaattatttgagactgactcagtaacagaagtaaaattttctcaaccctcagaagataacaaaggtcaaatcacacagggtggcactaacctccccaatgatggtattgtctacctgcaaccagataagtccttaaaatctattgatgaaaatgtaaaggtcctcattccagatgtcaatggaggctatcacactgagcattatgttactcattcttatcaaaaaggtgtgcttactgacgataaggcaggttttaatgcttactacctgtcagatactgaaaaaatagatagcactacaaagcacacttatctagccattcgtggtagtgatgggattggtctagatacactaaacgattgggttagtaacaatgcaatgtttgctgtctctaacaagtatattccacaagcgaaattggctaataaggctatgaaagaaaaaattgccgagctaaaaggaaaagcgcctggagctattatagatgttactggtcactcactcggtacgattgtatcttctcaagcagttgttaatcttagctatgcagaattggagaatgttggtcaagtagtccttttcgatggccctgatgtatcaagaagcttggaaaaaatggaaggcatttctgctaaaaaaatccaagaagctgggaagcatgttacctactatgtcaatccctttgatatagttagtatgcttaatcgtgaaaagccatagaaagaccaattcgggaaagtaaatgtcattgttcctagtaaatatacgggtacttttgatgagcaatcttctcacgattttggtgccttccaaattgatagtagcggaaatcctttagttgcttctgaaagctatcatccagaattattaacatctggtcaagacttagctagactcgaaaaaaaattcataaagaatcttttaggagagcattatgattcggataagctaggaccagtactcaaaggcgctctgactggggacctgactcgactaattgcaacattaaaagcttgtggtatcagtgtcactgtaaacgaagctaaaaaactgtacgataacttccaaaaagactacaaagccataatttccaaagctaaaaaagatggcctcgagtgggatcgcaaaaacatcgcaagcttccatagtaggatcaaatcagcatcaggcagtcaacggattttacttagaactcaaatgctctatatggcaacgcaattagcagaatcagatgtttcagaaaaagtctctgcaacaaaaaaacatattagtgaagctaaggatacgattgtagaaatatcgacatccactatttcatcagctgaaataatggctatgcaccttgaccaatcagaagttgatgctctggtttcagatataaaaatgtcaacagtttggaatgatggcgtagagacttctgattatgaagcacttgatcactataaaacaaaaatgaccacatttacgaccaatttggtaacagttgcacaaaatttaacagctcaagatgagcaactagctggtgatattgtcacgaacttatcctaaaatagagagattaaatgaatgtccaaagaattgaaattgcccttgaatgaaatgttgaaagaacaagaaagaatagctattaaggcaatagttgctacagcaaaaagcactattacggatactggaacaaatttaaaagcaactttagagtcagatgcccaagacctaaaaaactatgcatccacctataacgccaatatcacggatggtcttgaaggccagtcagctcaagcagcatctgatttcttgacacaacttccaaaaccagagttagataatccagtcaattaggaggctagtatgatagatacaaaaaaactgcaagaactcgatcaagaatatgatcaaaatctcagaaacatttatcgtaacagagagcaactagaagatgactttcacttgtttatggcaagaacagacagcctaaaagagtctgtctatcaagcaactttaggacaaggttgggaattaccccaagaagctcatgcacacctatataatatggatgataataaggatacattcatatcagaattcaatgaatatatggaaaagcttgaagaaaaggaaatagatcttcgaagagtttataatgatagagtagatgaattgtatcagaaggctaagcaaaacgaagcaaaaaaaggataaaaattttttcaagtaatatatataaatatgaaaaataaagaatcttgcagtaaaatgagtatttatttttcacgacgaacagtcactacaaaatcactaaaatctcaaaattacttggtttttaagttaatgtctaatactcaaaccttgttaaatcaatgtttgttatctttaaaaagtgctcagtagcactcaaaatccattgtcctcacggacatgccggttcgaccccggccgccggtatacttataaagacaaggtttagaaaccttgtctttttctatttttttttaaaatcaataaccataagggtaccatttatagttttatactttttcaattagatattttgctatattatcatgatcccgaaaaagattcttacggttaattcctatattgtctaattctttcataattttcattttgttttgtactttaatagttttatagagataatgagtaaatatttatttaaatactgggagtttatttcacgataaataaaatttttactcaatagatgaacagaaaaagattgtatactattgaaaaatttaattcaactggagattgtttggtgagtttatataaaagattattattgtttcaaattattggattctttgtgaagttattaatggaattactttaaataaaggaggaaaaattattttaaaaagtttgacttgttgcattacttattattccaagaagaagatctattccatgagttagtagatataaagacataagcttgaaaattttcaagcttttttatcttgctatttataacattaagtgatatatttataacataatacatgtgatatatttataacataaacttgggagattttatgaacaataaaaacaaatggactataattttacttatttttactatcatcgtaattgatgttagcttactatttggcgggaatcgtttaagtttaccaatcaaattattaattttattagtaaccagtatagcagaattttgttcgatttttataatgataaaagttccgactcctcaaaaatataagaaagaaccatttggattaaaagcaaaattttattctattgtactctttctctcgactattctttatacaattgggatatggaatgtgacgccagcttccccatacaatgttaaagaatcaattcttggagttggcattttaatacaagtagttttcttcatttattttctattaaaaaaaattaacgaaagtcccgatgaacgcttttatagtaatttagcattgtcagcttctttgatgtttttgatatcaataatgttattaattcttatagctatttaccttaatatatatggaacgttagagttaaaatcaggctacctttatattatggtaggtttattattactaatgtttgctgttacatattactttcttgagggacggagataataatggggaaagaaacaaaaattatcagttctttaaaacaggttagagaagatatcggaatgactcaacaagagttagctattcggataggtgttaggagagaaacaattggtcatttagaaaataacaggtataatccttctctagagatggcacttaaaattgttaagattttcgacatgaagatagaagatatttttcaattaaggaaagaggattaaggtgaaggaagtaatttgttcgttttgtggggaaaagattttataacttataaataaaataaggggtacgcaggattgcttcctcttaataggatattagctactggcctagaagtacatcatgatatttgtagaaattgtggtactattgctagaagttatataaatgacttggagaaattgaaataggtatataaaatatattggttactcaaaaatcactaaaatctcaaaatttcttagtttttaacctgatttccaaaacacaaatcttgttaaatcagtgtttgtttactttaaaaagtgcttggtagcactcaaaatccagtgtcctcacggacgttccggttcgaccccggccgcctgtatactttaaaagataaggtttctagacctcgtcttttttgttttgttagataatttattgtgaaaagttacctaaaattacttatatttgttttttattattgtattttttataatgtagttaataacttttcaaggaggtaatattatggaaattttaattgaaacacacttatttatttactctggaagaaaggaaataaaaattgaataaattttttttagaatcagagagacttattataaggccactagaagaaagtgattatgatagttggtatactagttttatgaatcgtggaccatctttaactccatttgatgatgggatacttgatatgtctatgtgtgacattaattggtttaaaaatttagtaaatttacaaaggaaagaatgggaaagtgacatagtatatatatttggtgtttttctaaaaagcggtgagcacgtaggaatgttaaatattgttacccttgcaagagcagatatgcaatggggagaattgggatatgtttttcataatcaattttggagtaatggctatgcatttgagtcaatcttggcattacttaatagtacttatgaaaaattgggttttcatcatattgaagcacagattactcctgggaatgaacgatcggaaaagttggttagaagattgggattaacctatgagacaactcgaaaagatttttcatttgagaatggaaaatggacagataaactgatttatagtataaatttacataataataatttagaataattttatagacttacaaagaaatttaaagcttataatattgtatttttggagattattgaagtggtttatagataattaaggaaggaatattgattagaaatgaataatttggatacactatattgtaaattagcaatgtgcaacacagtactaacggaaagattacgactccagcctgttgaattaactaatgtaaatgattttttagaattttcatctgattctgaaacagtattctatatgcaacgttataaagctaataccgtagaagaagcacaagtcgttttagcaaatgtttgtatgaaatcaccattaggaatttatgcaatgattgaaaaagaatcacagaagatgataggtattattgaattagaaatcagagatgaattttctgcagaatttggttatattttaaataaaaattataatggaaaaggttatatgacagaagcttgttcaaaattgatgtcaattggatttgaacatctagacttggaaagaatttatgctagatttgacattaataataaaaaatctggaaatgttatggaacggataggtatgaaaaaagaaggcgagcttcgtcatcttgcaaaaaatccaaaaggtgagtggaaaacaagagcgtattattctattttaaaagaagaatattttaataaagttaatactaaatagtctgagatgtagagaattagatataatctttttaatcagccagtgggtgatgtcgttgaaaattttacggaaggtaaaaatccgaagattgatacacttaatgggaaaacagttagaatagaaaaaataaatccagatcattttgaagacttatttcaagtttatggagaattgtctactgaagatagtttaacttatatatcttttagcaaatttaatagtaagaatgaatttgatgtctttttccaaactctattaaaatcagaagatccttattatttagctattgttgataataatactggtaaagtattagggactttttcattaatgcgtattgatacaaaaaatagagttgttgaaatgggatgggtggtttattcatcaaaactaaaacaaacaaggatagcaacagaagctcaatatttggttatgaaatatgtttttgaagaactctgttaccgccgttatgagtggaaatgtgatagtttgaatgcaccatctaataattctgcaaaacgacttggttttacttttgaaggaacttttagacaagctgtcgtatataagggtcgtaacagagatacaaattggtattctattttagataaagagtggccagagaaaaaaacacggtttgaaaaatggctagatgattcaaactttgctgtaaatgggtatcaaatcagatcactatcaagcattgagcagaagacaaaatagagtcattcattaatcactaaaatttcaaaattacatgtttttttagctaacatcttaaactttgttaaataaatgtttattaacttttaaaggtgcatggtaggactcaaaatcgggtgtcctcacggacgtgccagctcgactttggtcgcgggcatcaaagaaaaaagtcaagattattatcttgtctttttttctatgagttattaactgtaaaagttacataaaattaccaaataaattttttaacaattaattatcattctttatctaatttataatagggcttatattctatgtttgcccctatacttgaagcatgtacccattctttttctttaagttgtttaaagttttcggctttacctgttaatattattcccgaaaattttaatttgtcgctattatttaccttgtcgtattttttggcatacttttctaaatctgagtagatatttatattattaaagtatacttttgagttaccttttaagttttcttttattttatctatgaatatttgtggtgtattcaaagtttcaggatctgtaccgaattgatactttgttggccaatatgatgtatctaattctgtgcttgtacctatccataaccaattttgttttatattatttggtatcattgtttttatttctttgtaactataggacttatcaaaagttattgcaatttcaataagatcattattcaatttatttacatattttaaatcatttgttggagttgttttggcttctccttttttatacttaacatttttattgaaaaattgtggaactttttgtctagtacctcgatcatacaagccattcttttctgatttttcatcagcatttgtgccaaaagtacctgagatactataattttcttcaaaactagaatatggaatttgaaccccatcgatatctttaaatctatcagcatgtactttaccagtaaactgaccgcttggctggtaatagagactatcataggaaatatttggatatgctatttcagaaagtagttcaaagttatgatatgttttttgaccattttttgaagttaaatatgtaaaccctttaaaagctattccaactactaatagtacagttattaatgccaatactacggtcttgaataatgttttccttttcctttttttggctaattgttccagtggatcactaaactttgtttttatcatattttaaaattatccttttctaaatattttttaacttctcttctagctcgcataagtcttattttaattgtactttgtgattgtccagtaatttcagatatttctttaattgaaaaatcattaaaataatataaatctattaaagtttgataatctttcttcaagtgtaatattgcttcatgtaattcaaaaaacttctctgattcggtgtaatacaaattattttctataaagaattctttttgcaggatttcgttatagcgtttatttcttcgataaagatcaatatacctcctaattgtagtacgatacatccaagcttttattttatcaagtggaagggagaaatcagattctagtatttgtaaaaagacgtcttgagtaacatcctgtgcttgactaggattaacacctgacttaataaggtaagctattatttgatgtgaaataactagtaattctttttcatagtcatctaaaattgacattttacctcctttcgctattatattaaaccctcttcattaatataacgaattaaagagagctttggttacataaaaaaataatttatatatattaaaaatcaggtgatggtaaaaattaaagataaaataataaacttgtttttagttcatatgttagttctaaataataatataaaatcgtaaaaattttgttagactaacattggttttaaaatcttgtaaaaaataattatttttattaggtacttgacataagaagtagtttttaagaaaagagagcatgatgaaaaaatatataaaatggttaattcccatatctattattgggatgttactagtaggctgtcaaatgaataggggacctaaaagtcagtcaaacgaagtaaaaaatagcaagcaatcagaagtgaagaaaggtaaaaatatgataaaaaagaacagttagcctacctaaagaacatgaacaagaaataatggtgaattatttaaatgtatcttttgatagagtagagtatacgatggtatttttaatgagatgtagagtagattgaatgctttctttaaatttagaagtattatctagctcagtaattttaatatttgtttttctatttgttttagttcttcctctagattttcaggctttatattaaggatatataattgaataaagaaagtaatgaactgtccgattactgctcgaagtatttccattttattcaacgaatttccttcacttaaacagttgaaaattttagtaatgtttggatcagttgaatttattagcttagtaaaaatagttgatgtttcactattgattaataattcttgcatcaatattttaatgagatcattatttttttcaataaatttaaaacggtcctgtacaaagaaatgaattagttcctctttagtagaaaatgtagataattctgtaaagaaggggcgtccaatagtttgtacgattaactcgagaataaagaccaaaagcttgtctttagtttcaaaatatttatatatagttgcttggctaacttctgcatttttagctagttgagcagtggaagttccatggaagccttgtgaggcaaagagctctatagcggataaaataactttttgttttccttttggcatctcttggtcattaatatactgttcaatagaaaaaataatattatttttcatacttagttccttttcaaatggtattatactttacggtatcgttttagtccaaagatatttgcgatggttaaaataattaaaaatagaagaagtaccagaagatttgaagaaacgttaggtaatccttgaccgtacataattatttttgtaagtgcatcaccagagtaggagagcggtagaattttaccgactgtctgagcccaacttgccatattttctagagggattattcctgaaaagaataattgaggcattataattaagggaataaattgcatcatttgaaattctgattttgctagagtagacattaagattcctaatgataaggcaaccagagccaaaataaaattgacaatgatgacactaaaaatactacctacaacttgaatatctagtagccaaatagttgataaaacgataactatcgtttgaataattgctagaatgccgtatgataacatatatccaaatacaatatcactacgtttaacaggagttgcaaggagtcgatcaagtgtaccagaagtacgctcttttaataaagccattccagaaattaaaaaaacaaagaagaagaccataaatcccattagtattggtatcatttttgcaaaaaagcctgtatttttatttccgtaattatatttttctttgatatatttggagcgagtttgtaaggattgtgctagtttcggattcttattagctaaaattttaacttgcgaaatcagttccttactgttcattgtattaacagcggttttaaaagcttgtcttgttaaagtcgtctttgaagaatctgtattcgcatagaagacagtataagatttattgtcctccgaaataagagcatcaattttatttgatttgagtgcttttttagcagatgagttaaatttaaatgatctcacttgaatatgcttaatattatctaaatttgaaacgaccttcgtgttaacgttaatagttccaatcttaacttttgtattactattcgcagaaaacataacattcatcaaaaacataattaaaataggtgctaaaaacatcatagcaagtgttcttttatcacgaaacagttcttttataaccttttcagttattgcaataattctcatgattattctccttcagcttttaagaaaacttcctcaatagtactcacattaaattgtttttttaaatgtaatggagtatcaaaggcaataatgtttccacgtaatagtagtgcaaccttacttgttaattctgcttcatccataacgtgggttgtaataaagatagaatgtccttcatccttaatattaattagctcttgccagatttttctcctcaaggatggatcaattccaacggtaggttcatctaggattaaaactgtggggtttccaagtagggcgatggctagagaaagccgtcttttcatacctcctgagtaacctgagacaaatttatcaagttggttttctagatctactactttagaaatatgagttatctgctgttttaattcagttttttgaatacctttcatttttccaaagaataataaattttctaagccagttaaagactcgtataaggcatcagattgagccatatagccaatttgatttaaaatattacgatctggcatttgagtatcaagaacaagagctgttcccttatctgctttttccatgccaagcatagttttaatcaaggtagatttccctgctccagagggtcctattaatccaattatttcgcctttaaacacctccaaattaatattatttaaaacggtttctgaggcatatgctttttgtagtttttttaaatcgatgacttttttcatgataactttttgctcctctctcagtgagtgagtgtttactcacttatttgatatcatatattatagtgtgtaaagacaggcttgtcaataaaagaattgacaggaagttaatataccataatagtcaataaaatggcttatttgagataactaattttttatcttaaaaatcagttgcatggagagcattcgtgaaaatgggcacagaataaaacgactaagaatatccttgtcgttttattttttatatagttatacctcttttaaaattcaatataatagacttcctgcgaaactaaaatcctagttcacggttgatcattccagcaatcaaattcattcgtaatccaaaccgtttgcgtcgatttcgataggttgttgaaaatattttaaacgtttttactttggcaaaaatattctcaaccttgattctctctttggatagcgtatggttataggttttatcttcaagagttagtggcttaagtttgcttgatttcctcggagtttgcgcttgtgaatacatcttcatgatcccttgataaccactgtctgccaagattttagcagcttgtccgatgtttctgcgactcattttgaacaacttcatatcgtggcaatagttcactgcaatatccaaagaaacaattctcccttggcttgtgacaatcgcctgagccttcatagcatgacatttctttttaccagaataattcgctagttgatttttttaggacgattgatttttacctctgttgcatccacaatcaccgtatcctcagcactaagatgagtttttgaaatcgtaaaaccactttgaataagagttgattcaacccattgacttcgacggattaagttgctttcgtgaatgccaaaatcagccgcaatttgttcataagtgcggtattctcgcatgtattgaagagtagccatgaggagatcttctaagcttaacttaggggttcggccaccttttgcgtgtttacgttgataagctgtttttaacacagctaacatctcttcaaaagtagtgcgctgaacaccaacaaggcgcttaaatcgtacatcagttaattgtttgcttgcttcataattcatagaactattgtaccatattttgtttcgcaggaagtctaataatgtttattcaggtattttttaacaatgatatgaagagagaagctaagtcccagtataattaaataaatccaaagggggatattaatgaaaggaagatgataatattttcctataaggatataagctatgataagcgaaagaattagaaatatatatcgaaagaaatatttcttttctttcgatttatcgaagttatatgtagcatatattatggtatcagctatcttgacagcaataatactgataaagattgcaaaaagaacatctaatagagtaatagggattagatctggtactgactgttgaagtgcttcagtaatgagatatcctcctaaaaagataatcatttggatagttagtagtaaaatggctaaatcccaacgttgtaatgtttcttctttcttagagattttaggtgtagatttaataacttggtttataaagtcatgcctatcttctccaaatacactaactaaacttgcttgtcgctcttgtgcttctaataacatattgacaatatcatttcgaatgagctcctgatggtaggggctaatgctagcacctcgcaaatagacaatcatatctgtataggtttggttattagagttatcaattcttccttctaatagcgtattttctttttgtaattttttcagtttatccatgctagtttcctctccaatttttagagtagtttgtttaatgctttactaagtgactcccaattctgtttaaattgggctaattgctccacgccttcattggttaacgtataatatttacgcttaggtccttgaggggaaggcttttgttgtccttttatatatttattgctttgtagtcttaagataatggggtagattgtcccttcggaaatttctccaaaaccataagaatttaatttttttgagatttcataagcataagtctcctcttgctgtatgatttttaggatagctccttcaagtaatccttttagcatttgcgatggaatcatattatatccttgtctatattgtaatacaagttactggtatagctacattgtaatacaaagtagttgagatgtcaaatataactaagttaccggtagaaaataagagtgatagacgatgattcttctaaaataggtttgtttatgtcctttagtttatgttataataatgtgaagaaactttaggagtgagtatgaaaatagataaaaaagaacttttagcacttattgctagtattattttattaatttttgcttctgttacgtttttcttatttaaagatcatggcactactcaaatggatactgtagaaagcagtgttaaccatgtcagtgattctcaattaactgaggcacaagatatgttagataaatttgagaagaaaccttcagaaaaattattgaaggatgtcgaacttgctttaaataaattgtccaattcttctaaaaaagaagctttgcaaaaacgttttaagaaagcaaaagataagtatcttaaagacgaagcagataagaaagctaccaaagatgctacagatttagtagaaattctagaacaagccccttcagaagaaaatgtgttaaaagctgaagcagcagtcaataagttaactgtcaaagaatctaaagaagctttacaaaaacgtattgatactgttaagacacaatatggtttgattgggaatcaaactccctctagttcagtagctgaaactacagaacaagggacagctaatcctgctagtcaggatacttctagttacgttaatcagaatgtagcaccaacttatgagcaaccgcaagcgaataatacaccagttactccaggggttaacaatactgttccgactccaggaactggtactgtacctgctactaatgggacaggtgttgctcagtaaaatcctgaaagtctagttttactagacttttttgctatgctttttaattagccattctcatcaaaaactataagagaattagcaattgatagttttgaagaaggaaaagaattatgagcaacagcaattaaaaccttaaaaatacaaccaagtgaagtggtttataacaagtgtacagttctttcttagaataaaccatgacttgtcaaaaaataggtatataccatttacaaaaataccttaaagcgttataatgagagtgaatggggggaagaagatgacgaagtacatcaaggctgaccgattcttttatgctgatcatgtaaaggaaaacggttatttagaaataaaagataatcactttggtaaatggatagaaaatatttctggacaagaggagattttagattattcaggttatcaaatagcacctggtttagttgatacacatattcatggttttgctggcgctgatgttatggattgtgattcagaaggaattttgcgaatgagtgctggcttactatctactggagtcacatctttcttgccgacaaccctaacttcagatacaaagcgactagaagaggcgtctaaatcagttgcggcagtagcgggcaaagaacaaggagcaaaaattcaaggcatctattttgagggaccatattttactgaggaatataaaggagctcaaaatccgatttatatgagaaatccaaacttggaagagtttgctcaatggcagaaggctgcaaaaggcttgattacaaaaattgctttggcaccagaacgtgagggagttgaggaatttgtctcagcaatcacaaagcaaggtgttacggtagctttaggtcattctaatgggacatataaagaagctaaaaaggcagtgaaggcgggtgcctcagtttgggtacatgcgtataatggtatgcgtggtttgacacaccgagaaccaggtatggttggtgcggtttataatttacctaatacctatgccgaactcatttgcgatggtcatcacgttgatcctgttgcttgtgacattttaatgacacaaaaaggccataatcatgtggcattaataacagattgtatggcagctggaggtgcccctgatggagattatatgttaggggaattgcccgtggttgtgtctaatggaactgcgcgtttgaaagatggaggtaatttagctggttctattcttaagctcaaagatggattaaaaaatgttgtagaatggggaattgctactccggaagaggcagtgcgtatggcgagttatgttccggcagtgtctgtaggcattgataatgtctgtggacagataaaagaaggttatgcagcggattttattgtattagataaacatctagatttagttgcaacataccttgatggggaaaaacgttggcaatcttgaaagaactagtttttactagttctttttaatttattaatttttaatgaaatatagtttgacaataaaactattttttcttataatgttgtaatataatacaaaacaataggagtttacaatgtcaattattattgggttaatggccgctatgtttattattcgtttagcttatttaaagctatctatagctaatgaaaaggccttaagaaaaaatggtgctaaagaatatggtgtaggtgtttcaaaagcaatcacagttcttcatattatcatttatttttcatctgtaactgaggctattctaacaaaagcaagttttaattttgttagcgtaatcgggcttagcttgatgattttttctgtgtttatgttacatacagtaacacgtttacttggtcgtatttggacagtgaaattaatggtagataaaaatcatcaatttgtagatcactggttatttagggttgttaagcatcctaactatttcttaaatattgctcctgaacttttaggtgtaactttattgtgtcatgctaaatacacagcattatttgtcttgccaatttatgcttttgttatttatttaagaattcgtgaagaaaacttattattaaaaacgatcattattccaaatggaatcaaaaagtctagggtatattaagaataagataaatagtagacataaaagtcattttttgttatactgtctcagtaagaagaggtgttcatcagctgtttttttagcgagctcaaggtagtgaaagttgggtagaataggatgaatattggcactttttagtgagtaaaagtacaatcaaaaatgaagtaataaattagggtggaaccgcgtctttgacgcccctgtgctgttgggcataggtggtgtaggacgtggtttttatcatttgtccgttttaagtcaattgttgtcaccttcccaacagctgtaataaagtgtgaaagaaggaaaatgatgtctaagaaattaacttttcaagaaattattctaactttacaacagttttggaatgaccaaggctgtatgttaatgcaagcttatgataatgagaaaggagcagggacaatgagcccttatactttcttacgtgctataggccctgagccttggaatgctgcatacgttgaaccatcacgtcgtccagctgacggccgctatggcgaaaatccaaaccgtctttaccaacatcatcaatttcaagtggtaatgaagccttcgccgtcaaatattcaagaactttatttgaagtctttggaattactaggtatcaatccacttgagcatgatatccgttttgttgaagataactgggaaaatccatctacaggttcagctggattaggttgggaagtttggcttgatggaatggaaataacacaatttacttatttccaacaagtaggtggacttcaaacaggtcctgtaacttctgaagttacttatggactagagcgtttagcctcttatattcaagaggtagattctgtttatgatattgagtgggcaccaggtgttaaatatggtgaaatctttactcagccagagtatgagcattcaaaatattcatttgagatatcagaccaagtaatgttacttgaaaactttgagaaatttgaaagagaagcaaaacgtgctttagaagaaggacttgttcatccagcttatgactacgtccttaaatgttcacacacctttaatttattagatgcacgtggagcagtatctgttactgagcgtgcaggctatattgcacgtatccggaatttagcacgtgttgttgctaaaacctttgttgccgaacgtaaaaaacttggtttcccacttttggatgaggaaactcgtatcaaattacttgctgaggaagactaatgaacacactcattgttaatagtcatcctgatttttcgaatccgtactcatttacaactattctacaagaaaagtttattgaactttataatgagcattttcctaaccatcagttatctattttaaatttatatgattgtgttttgccagaaattacgaaagaagtactactttcgatttggtctaaacaaagaaagggtttggaattaacagccgatgagattgttcaagctaaaatctctaaagatttacttgaacagtttaagtcacatcaccgtattgtctttgtttctccaatgcacaattacaatgtgactgctagagcaaaaacttatattgataatatttttattgcaggtgagactttcaagtacactgaaaatggttcagtcggattaatgacagatgactatcgtctgcttatgttagaatctgcgggttctatttattctaaaggacagtatagtccatatgaatttcctgttcattatttaaaagctatctttaaagattttatggcttttgatgatttctgtgttgttcgtgcagaaggtaccgatattttagataggcaagttgttcttgataagatgaatcaggatttaagagaagcatttgaagcgttttacagtaaggagtaggaaatgactaaagatttattattggagcttggccttgaagagttgccagcttatgttgtgacaccgagtgagaagcaattgggccaaaaaatggtcaagtttttagaggatcatcgtttatcatttgaaactgttcaaattttttcaactccacgtcgtttggctgttcgtgtgaaaggattggcagaccagcagacagatttaacagaagatttcaagggtccttctaagaaaattgctttggatgcagaagggaatttttctaaagcagcccaaggttttgttcgcggaaaaggtttaagtgttgatgatatcgaatttcgtgaagttaagggagaagaatatgtttatgtcactaagcatgaaactggaaaaagtgcgattgatgttttagcgagtgtgacagaggtattaacagaattgactttcccagtgaacatgcattgggcaaataatagttttgaatatattcgtccagttcacactttagtggtattattagatgatcaagccttagagctagacttccttgatattcattcagggcgtattagtcgaggacaccgtttcttgggttctgacactgaaatttcatctgccagttcgtatgaagatgacttgcgacaacaatttgttattgctgatgcaaaagaacgccagcaaatgattgttaatcaaattcatgctatcgaagaaaagaaaaatatttcagttgaaattgacgaagatttactaaatgaagtgcttaatttagttgagtatccgacagcattcttgggttcttttgacgagaaataccttgatgtacctgaagaagttttagtcacttcaatgaaaaatcatcaacgctattttgttgttcgcgacagggatggaaaattgttaccaaactttatttctgtgcgtaatggaaatgctgagcatatcgaaaatgttataaaaggtaatgaaaaagttttagtggctcgtcttgaagatggtgaattcttctggcaagaagatcagaaacttaatattgcagatttagttgagaaattaaaacaagtaactttccatgaaaaaattggttcactttatgaacatatggatcgtgtaaaagttatttcacaatatttggctgagaaggcagatctttctgatgaagaaaaattagctgtgcttcgagctgcaagtatttataaatttgacctcttaactggaatggttgatgagtttgatgaattacaaggtattatgggtgagaaatatgccttacttgcaggggaacagcccgcagtagcagcagcgatacgtgaacattatatgccgacatctgcagatggagagcttccagaaaccagagttggtgcaattctagctttagctgataaatttgacaccttactttcattcttctcagttggtttgattccaagtggttcaaatgatccatatgctcttcgtcgagctactcaggggattgtccgtattttggaagcttttggttgggatatcccacttgatgaattagtaactaacctttatggtctatcgtttgctagtttagattatgctaatcaaaaagaggtcatggcctttatttcagctcgtattgaaaagatgattggctctaaggtccctaaagatattcgagaagccgttttagaatcagacacttatattgttagccttattctagaagctagtcaagcattggtgcaaaagagcaaggatgctcaatataaagtttccgttgaaagtttgtcacgtgcatttaatttagctgaaaaagttactcattctgtattggtggactcttcattgtttgaaaataatcaagagaaggcgctatatcaagctattttgtcacttgaactgactgaggatatgcatgacaacttagataagcttttcgcacttagtccaattattaatgatttctttgataatacaatggtaatgacagatgatgaaaaaatgaaacaaaatcgtctggctatactcaatagccttgttgcaaaggcaagaacagtcgctgcttttaacttattaaacacaaaataaggaggcattttatggatcctaaaaaaattgctcgtattaacgagctttcaaaaaagaaaaaaacagttggattgaccggagaagagaaggttgaacaagcaaagctccgtgaagagtatattgaaggtttccgccgatcagtccgtcaccacgttgaaggaattaaattagtggatgatgagggcaatgatgttaccccggaaaaacttcgtcaagtccagagagaaaaaggactacatggtcgtagtttggatgatccaaattcttaatggtgagacaattttagattaaagtcaacacttgggtggggcaaaagataatctttgtctcgccttttttattaggaaggaaaaaataatgattgaattactattagcattactgttatggaatattttagtatttgcaacctatgctattgataaaaggcgtgcaattagaggggcatggcgtattagtgagaaaacattgatgatagagagtttattattagggggatttggtgcattcctaggtggagaagtttttcgtcataaaacgactaaatggtatttcagactagtttggtatatcggaatgattattgatttagctattatttggctaatttggtgttattgatgatatcttatcaaaaattttaggagcatattaaatttttgatagtgcaggatagactgatttaggtataatagaattacaaaaagaaaacgcttacttttaaggaggaagtttatgtcttcagaagaaaaatacattatggcgattgaccagggaacaacaagctctcgagcaattatttttaataaaaaaggtgaaaaaattgcgagtagccaaaaagaatttccccaaatttttcctcaagcaggctgggtagagcataatgctaatcagatttggaattctgttcaatctgtcattgctggagcttttattgaatcaagcatcaaacctggacagatagaggctattgggattaccaatcaacgtgaaacaactgttgtttgggataaaaaaacaggtcttccaatttataatgctattgtatggcaatcgcgacaaacagccccgattgctgatcaattgaagcaagaaggtcatactaacatgattcatgaaaaaactggtcttgtcattgatgcttacttctcagcaacaaaagttcgttggattttagaccacgttcctggagcacaggaacgtgctgaaaaaggagagttgctttttggaacaattgatacttggttagtttggaagttaactgatggtctcgtccatgttacagactattcaaatgctgctcgtacgatgctttataatattaaagaacttaaatgggatgatgaaattttagagttactaaatattcctaaagcaatgttaccagaagtaaaatctaattctgaagtttatgggaaaactactccattccatttttacggtggagaggtgccaatttctggtatggctggtgaccaacaggcagcattatttggacagttggcctttgaacctggtatggtaaaaaacacttatggtacaggttccttcattatcatgaatacgggcgaagagatgcaactgtctcaaaataatctattaacaacgattggttacggcattaatggtaaggttcattatgcacttgaaggatcaatcttcattgcaggaagcgctattcaatggttacgtgatggtcttagaatgattgaaacgtcaagtgagtcagaaggccttgctcaatcatcaacaagtgacgatgaggtttatgtggttccagcttttacaggtttgggtgcaccgtattgggattcaaatgctagagggtcagtatttggattaactcgtgggacaagtaaagaagattttgttaaagctacacttcagtcaattgcttatcaagtacgagacgttattgacactatgcaagttgattcaggaattgatatccaacaacttcgtgtagatggtggagctgcaatgaataatttattaatgcaattccaagcggatattttagggattgatattgctcgtgcgaagaaccttgaaactactgccttgggtgcagctttcttagccggactttcagttggctattgggaaagtatggatgaactaaaagaactgaacgcaacaggacaacttttccaagcaacaatgaatgagtctcgaaaagaaaaactgtataaagggtggagaaaagctgtcaaagcgacacaagtatttgctcaagaggattaagggggtgtagagatggaattttcacgagaaacacgacgtttagccttacaaagaatgcaagatcgtactctggatttacttatcataggtgggggtatcacaggcgctggtgtcgctttacaagcagcagctagtggattagatactggacttattgaaatgcaagattttgcagaagggacaagtagtcgctcaacaaaattggtccatggtggtcttcgttacttgaagcaatttgatgtagaagttgtttctgatacagtatcagagcgtgcagtcgtgcagcaaattgcaccacacattcctaagccagatccaatgcttttaccggtttacgatgagccgggttctacttttagtatgtttcgccttaaagtggctatggatttatatgatttattagcaggtgtgacaaacacacccgcagccaataaagttttaagcgcagaagatgttcttaagcgtgagcctgatttacaaaaagaaggtttgctaggcggaggggtctatttagatttccgtaataacgatgcacgcctagtgattgaaaatattaaacgcgctaatagggatggagcttatattgccagtcatgtcaaagctgaggacttcttatttgatgacaacaatcaaattataggagtacgtgcgcgtgatttgttgactgaccaagttatcgatataaaagctaggcttgttattaatacaactggaccttggagtgacaccgttcgcaacttctccaatgaaggtaaacaaattcatcaattacgtccaactaagggagttcacttagttgtagatcgccaaaaattaaatatttctcaacctgtttatgttgatacaggcctgaatgatggtcgtatgatttttgttttgccacgtgaagataagacttattttggaactacagatactgattaccatggagacttagaacatcctacggtaactaaagaagatgttgactacctccttaatattgtaaacaaacgcttcccagaagcagagcttactattgatgatattgagagttcatgggcaggtttgcgtccactactatcagggaatagtgcctctgactataatggaggcaatagtggaaaactaagcgatgaaagttttgaagaattaattgattccgttaaagattatattgcacataaaaatcatcgtgaggatgttgaaaaagctatttctcatgtagaatctagtacttctgaaaaagaattggacccatcagctgtttctcgaggatcaagttttgagcgtgatgataatggcctattaacacttgctggtggtaaaattactgattatcgaaaaatggcagaaggtgccatggaaactattattaacattttggataaagaatataatcgcaagtttaaactaatcaattctaaaacctatcctgtttcaggaggagagattaacccatctaatgttgattctgaaattgaagcttatgctcaattgggcacactaagtggtttaagtattgaggatgcacgttatattgctaacctttatgggtcaaatgcaccaaaattatttgcattgacacgccaaattacagaagcagaaggtctgagcttggtagaaacgttgtcacttcactatgctatggattatgaaatggcgcttagcccaacggatttcttcttaagacgtacgaaccatatgcttttcatgagagataatttagattctttgattcagcctgttattgatgagatggctaaacattatcaatggtctgatcaagacaaaactttctatgaagaagaattacatgagactctaaaagacaatgacttggcagctttgaaggataattgaaggagataataatggatatttttggagaattcttaggaacagctctcttagtcttacttggtaatggtgttgtagcaggtgttgttttgcctaaaacgaagaatcataattctggatggattgttatcacatttggatggggacttgctgtagctattgcagcgttggtatctggcaatattagccctgcccacttgaatccagctgtgtcattagcttttgcgatcaaaggtgatttagcttggggaacagctattctttatatgattgcacagattattggtgcaatgctaggttcacttcttgtttatttgcaatttagaccccattatgaggctgcagaaaatagagcagacatccttggaacttttgcaactggtccggctttgaaggataatttttccaattttttaagtgaagtattgggaacacttgttcttgtacttactatttttgccatcggaaaatacaatatgcctccaggagttggtacgatgagtgttggtatgttagtggttgggattggtctatcgctcggtggaacaacaggttatgctattaatcctgcacgtgattttggtcctcgtttattgcatgccttgttaccgatgaagaacaaaggtgattctgattggacttattcatggattccgatagtaggacctatggtaggagctattttagcagccttaatatttgctatgatgtaagagatttttgatgctgagaccgactttatggtctcagttttttgttaccgttttcaaaaataacttcttttgttataataagtaattatgacagaaaaatatgtaaataaagtaattgtcattttaggagcttcttttgctggtatgacttgtgcgcagaaattacgccaattaaatcctaattgggatatcgttttgattgataaagaaattcatccagattatgttccaaatggcttaaattggtattatcgtcacgaaattagtggtttaaatcaggccatgtggcagacagaagaagagcaacggttgcagaatatacgctgtctatttggtctaaaagttgagaaaattaataaagaagatagggaattaatgttatcagatggttcttctgtctattatgatcaattgatttgtgccatgggctcccaagcagaatcaacttatattgatggggctgatgcgcaaggtgttttaacaacaaaaacttatgcaactagtcaaaatgctaagcaggtattagataaaagtcataaggtagcagttgttggggcaggtatcatcggtttagatattgcttatagtttacatgaatcagggaaggcggtcactttgttagaagctcaagaaagaccagacttcaggcatacagatcctgatatgtcccttcctttacttgatgcgatggctgaatcaaaactacattttttccaaaatcaaaaggttgagaaaattactgtaacccgagaagaaaaactttgtttgcgaacgctaacaggagacacctttacagttgatgctgtcatattagctgttaattttcgtccggatagtcgtcttttaactgggttggttgatttaagtgttgataatagtgttgttgtaaatgattatttccaaacgagtgaccctaatatctatgctattggcgatttgatttggtcgtattttaaaggtcttaatagtgcttattatatgcccttaattaaccaagcaatccgttcggcacaaatgttggcataccatttatcgggacatgctgttccaaaattaaaaataacacgcgctacaggatctaaacactttggctattatagagctaacattggattaactgaattggaagctggtttttacgaggataccgttagtgttacttatttccctaaagaacagtatgatttaaggataaaattgattgctaaccaaaaaacgggccatttattgggggctcaattaatctcaaaggaaaattgtttggctactgccaatcagcttgttcaagctatatcgtgtgatatgacagattttgatctggcttttcaagatttcatttatacagctagagaatctgagatggcttatatgttgcatcaagcagctatcaacctttatgaaaagaggattgggctatgcgaatagaagctctaatggaaaaagaaaggcgtgttcaatatcggctactttcttttttaagaggctctcctcaggcaatagcactgaagttagctttattagaaactggtttaagtcgagcaacttttcttaaatatatcaataatcttaatagctactttgaacaagaaaaagttaattgtcgaatcgtttattataaggataagttatttttagaagaggattataacttatccaatcaagaagtgttgaaagctctgatgaaagatagtattaaatacactatcttaatatctttatttaatcagcgtcagttcacaatcgttggtctttctcaagaattgatggttagtgaggctactttaaatcgtcatcttgctcatctcaatgaattgttagcggaatttgatattgctatttcacaaggaaaacagattggtgatgaattgcaatggcgttatttttattatgaattattcaagcaactatggtcttatgacaagtgccaaaatatgataaagaaattagacttagactcattaattctattaatagagcgcttggctcaacatactttaactcgagaagctcatcaaaatctgggactttggtttagtatttgtcatcatcgtctccttgctatggaaaaaatatctgataatctcaagcctattgtgaaacattatcaatgtaatgctttttataaacggttagacgcagccttagttttgtatatgagtcgttttgctcttgagtatagggaaggagaagttctggcaacttttgcttttctacattcacaaaatattttaccaatcaatacaatggaatacatcatgggatttggaggcccgattattgattgtgtaaccgaaacaatcatctactttaaaaaggagagtattttagctgacgagacatcagatcaggttatttaccaacttggtcagttatatagccattattatttctttaaaggtcatattttagttgaacaacctgatttagaacaaacgtatcgacttattgatcataatatgagggataagttgcatcatatttcaaagaagattattgcaaatgttaatcgaattagacctttaacagaagatggttgttctttgctgactttacatttgttggaattgcttattttctcgaaaaatagtcaaaaaatgccctttaggattggtctagatatgacaggtaatgctgtggaacagtcattgttggaatatcgcattcgacaacatttctctggtaataattctattcaagtcgaaccttatgacgaaggaaagggatttgatatggttatttatcagagtcactcaagaccttataaagccaaactaacctattgccttaataaaggtgcttcagagcgagaactacaggaaatagattcacttatttatgacaattaatcccattacttaattgaatggttttaatccctccagaaattgttaaaacgtttacgtattttatgttataatatcaaagacgaacaattttaaatttagttgttaaaaacagaaaggttttatcatgacatttgacaccattgatcaattagcggttaatacagtccgcacgctttctattgatgctatccaagcagcaaattctgggcacccaggtcttcctatgggagctgcgcctatggcttatgtgctttggaataaattcttaaatgtaaacccaaaaacaagtcgcaattggacaaaccgtgaccgttttgtgctatcagctgggcatggttcagctcttctttatagcctacttcatttagctggctatgatttatcaattgatgatttaaaacaatttcgccaatggggatcaaaaacacctggacatccagaagttaaccatactgatggtgtagaagcaacaactggacctttagggcaaggtattgctaatgctgttggtatggcaatggctgaagctcatttggctgctaaatttaataaaccaggctttgatttagttgatcattacacttatacacttcatggtgatggttgtttgatggagggtgttagccaagaagctgccagtcttgctggacacttaaaacttggtaaattggtccttctttatgattcaaatgatatctcacttgatggtccaacatctcaatcatttacagaagatgttaaaggacgttttgaatcatatggttggcaacatatcttagttaaagatggtaatgatttagaagcgattgctgcagcaattgaagctgctaaagctgaaactgataaaccaaccattattgaagttaaaactattattggatttggcgcagagaaacagggaacatcttcagttcatggagcgccacttggtgcagaaggtattacttttgccaagaaggcttatgtatgggaatatccagactttactgttcctgctgaagttgcagatcgatttgcctcagatcttcaagcgcgtggtgcgaaggcagaagaggcatggaatgatctttttgctaaatatgaagttgagtatccagaattagcaactgaatacaaagaagcttttgctggccaagctgagacagttgaactgaaagctcatgacctaggttcatcagtggctagtcgtgtttcaagccaacaagctattcaacaattatcgactcaattaccgaacctctggggagggtcagcagacctctcagcttctaataacacaatggtagcagcagaaacagatttccaagcaagtaactacgctgggcgtaatatttggtttggtgtacgtgaatttgcaatggctgctgcaatgaatggaattgcgcttcacggtgggactcgtgtttatgggggtacgttctttgtcttctcaaactacttgttaccagcagtacgtatggctgcacttcaaaacttgccaactgtctatgttatgacacatgattctattgctgttggagaagatgggccaactcatgagccaatagaacaattagcatcagtgcgctcaatgcctaatttgaacgttatccgtcccgcagacggtaatgaaacaaacgctgcatggcaacgagctgtatcagagacagatcgaccaacgatgcttgttttaacacgtcaaaacttaccagttcttgaaggaacatcagaattagcccaagaaggggttaataaaggtgcttatattttatcagaagctaaaggtgaacttgatggtatcatcattgcaacaggttcagaagttaaattagctttagatactcaagacaaacttgagtcagagggcatccatgttcgcgtcgtatctatgccagcacaaaacatttttgatgaacaagaggcttcatatcaagagcaagtgcttccatcagctgttacaaaacgtcttgctattgaggcaggatcaagcttcggttggggtaaatatgttggtttaaatgggctaacacttactattgatacttggggagcatcagcaccaggtaacagaattttcgaagagtatggctttacagttgagaatgctgtatcgctatataaagaactttaagagcatgaagaagttgggaaagatacctcaacttcttttttgtaagatataggatggatttgagaatagttttgatagactgataagtgatggaaagcactcttttttgaaaacgtttgacaaacattccatagcgcagtataattgataaaactattgtatatataaaataatacaactattattaattatctttttagaaaggtttgtttatgaagaaggagtgtcgtgatttttatcggcagatacagcatacttacaatgatatatctgtccgtgaagatgcagtgctatcatcaatactattatcagcatcgaatggtttgataaaaactagcgatgtacctcgtgttgcttatgagttaactcagcaattggaaaataatgagatagaaaaatctttcgagtcattagctacagttaaggaattgaaaaaatctgctaaaaaattgtctgagagatatgagcaaaataaggtaacaacgggattgctttctaaagtatttggaaatcattaggagataaaaggagatttttatgattaagtttgaacatgtttcgaaagtatacggagaaaaagaagctctcagtgatttaaccctctctgttaaagatggtgagatttttggattaataggtcacaatggagcaggaaaaacaacgacaattagtattctaacatctattattgatgcaacttatggccaagtctatattgatgacctacttttgacagaacatcgtgaccaaattaagaaaaaaataggttatgtaccggactcgccagatattttcttaaatttaaccgcagaggaatactggtactttttagctaaaatttatgacgttgccccagaagatattgaagcacgtatcacaaaattggtagacatatttgaactagaggagcaacgctataatcctattgaaagtttttcacatggtatgcgtcaaaaagtcattgttataggtgcccttcttccaaatcctgacatttggattctagatgagccgttaactggtttagaccctcaagcttcttttgatttgaaagaaatgatgaaagaacatgctaaaaatggaaaaacagttattttttcaacacatgtcttagcagttgcagaacagttatgcgacagaataggtattttgaaacaagggaaattaatctttgtcggtagcttaggtgagttaaaaatgaaatatccagataaagatttggaaactatctatttggaattagcaggacgtcaagctagtagggagggataaagtatgaattggtcacgtatctgggaactcgtaaaaattaatatcctttattcaaaccctcagactctatcggcactaagaaaaaagcaagaaaaacatcctaaaaaagaattttcagcttataaatccatgtttagaaatcagttatttcagattttgctcttttcaataatttatgtatttctctttgtatcacttgattttaaagaatatccgggctacttcacgttctacattggtatctttacactagtatccattatctactcttttattgcgatgtacagtgttttctatgagagtgacgatgttaaacaatatgcttatttgcctattaaatctgaagagctctatgttgctaaaatttttgcaacatttgggatgtctgtaacttttctaatgccaatcctaaccttaatgattgtggcttattggcgtataataggtggcccacttgcggtcctcctagcaatcataaattttgctattttatttttatcggtaacggtgatttcattgtatattaatagtttaataggccgtgccattattcgaagtgctaatcggaaacttatttctactatattaatttcactagctacatttggagcaatagttcccttattatttgtgaatatgacgagtcaaaagatggtacaagggaaattacaagatatcgctccaatcccttatgtcagaggttattatgatattgttacagcgccatttagtatggagagtctcctcaactattatctcccgctcttaatcattttattcttgataggtgctatttataaatgggttatgccacgctactatcaggagttgttgtatggacaggtcaagcagagaaaagtccatcgtcaaatcgattttagtaaacgtgagtcaattaataaaactcttgttaaacaccatttatcaagtttacaaaatgcgacattattgacaaatacatttttaatgccactattatatctagcaatgttcattgttccaattttgaataatggtaaagagattggtcgattttttaatgaaaattattttgggatagcttttctagcaggaatattaataggtagtttatgtgtgatgccagctagcattgtaggggtaggtatttctttagaaaaaagtaatttctactttataaaaagtttgcctatatcattttcgtatttcttgaagcataaatttgtaactttgataaccttacaacttgcagttcctacttttatttatttcttggtaggattctttctacttaaactatcaatcctcgttttattgagcttcattttaggtctagtcttcatgggacttatcgaaggccagtttatttatagacgtgactataaacatttgttcttgaattggcaagaggttacgcaactatttaatagagggttaggccaatggctgttagttggttcattgtttggaatgatgataataggtagttttcttattggaataagtattttttggtcaatggtatggaatactgtagctgtcaatatcataatccttatcattgggttgctcatattatcaatttgccaatacttactgctaaaaaatttttggaagaagcttgtttagtaaaaaggttttagaaaaatcatacagtaagaataatgcttaataactgagatagttatagcggataaaataaaggcttgttgtggactttacggttggaaggcagccactgtaatcctttgtttaataacgctagttttagctctaaaatatttgatttttattgctatctattatatcttatcagacaaagagactagggataacctagtctctttgtctgatgctaacttgtttttcgtaatattgtgctagaatgaatgtcaatatagcagttgtgcttacagtaatgataactgcaataagcatggtaataaaaagatgtgttgaagtatgactgatataaagaaacagacctggtagaccagaagagcctacagcgaagcggtgagcgttcattataccggcatagagtcctccaagaccaccaccaataagtgaggctattagaggataacgtttcggaaggttgacaccatataagataggttcggtgattcccatataagctgttatggcagcaggtccagcaatttctttaagttttttttcttttgttataagagtcaccactgtacctgcagttgcttgtgcgatatttgagcagagcatgcctggtccaaaaatagaatcaacccctaatttcgctagttgtgtgattcctaatgcagcaattccactatgaacaccaaacatgattaggataggagcaaatgctcctactagaaaagcaggtgcccaactggcgtatttggataaaaaagtaaaaataacagctaaatattggccagcgatagtacccattggtcccaatatagagaacgacaaaattcccatgctgagaaatattaacataggaacaagcactaaacgcagtgatttaggaataatttgctttaaatatttttctatataagcctgaacacaaataattagaataatgggaatgacacttgatgcatagttagtaagtgtgaatgggatcgtatggaataaggatactggtttaccagaagctactaaattagcccaattagggtgaaggagcatgacaacagttcccaaagctaaaataggattagctttcaatttttgagcagctgtgatggcgattaagataggtaaaaaatagaaaacaccatctgcaaaaagatttagtaatatatatgtttgagatgacggtgtcaagattttgaatactagtaataaagctagcaatgccttaatcataccagcgcctgataaagcaggtaaaatcggttggaaagtcccagaaacaaaatcaataattcgactaactgctttggcttttttggtttgttctattttagtcgttgagttagtttcaatgagggagttaatttcttcaaacacttttgcgacatgagtccctatcactatctgatgttgccctccgctgataacgacagtttttacctcttttaaagtttttaattgctcaaggtttactttcgtcggatcattgagactaaagcgaaggcgtgtttgacaatggtaaacattgttaatattattttgtccaccaaggtgtttgatgatattttttgacaaggtgatgtattctctagacataatatctccttaatacttataaaacgttttccgattctagattatagcatagtaataaaagaaaacacttggaaatgcttgtgaattttcaatgatgttttcagatagcatttctaaagggcctatgatataatttttttatgaaaagacattttgagacaactagaagaattgttattaaagtaggaaccagttccctcgtacagacaagcgggaaaattaatttaagtaaaatagaccatttagcatttgttatttctagtcttatgaatagaggcatggaggtgattttagtatcatctggtgctatggggtttggtttagacattttgaaaatggataagcgtcctcaagaaatatcacaacaacaagcagtttctagcgtaggacaagtagccatgatgagtctttattctcagatattttcgcactatcaaactcatgtttcccaaattttattaacacgtgacgttgtggtttttccagagagtttgcaaaatgtaacaaactcttttgagagtctgctctctatgggaattttgccaatcgtcaatgagaatgatgctgtcagcgtggatgagatggatcataaaacgaagtttggggataatgaccgtctctctgctgtcgttgctaaaattactaaagcagatttattaattatgctgtcagatattgatggtctttttgataaaaatcctaatatttatgatgatgctgttttacgtagtcatgtttctgaaatcaccgatgacatcatcaagtcagctggaggagcaggaagtaaatttggtactgggggcatgcttagtaaaattaaaagtgcacaaatggtgtttgataacaatggacaaatgatattgatgaatggcgccaatcctcgtgatattttaaaggtgttagatgggcataatattggaacttattttgctcaaggaaagtgagattgagttatgacgtatattgaaatattagggcaaaatgctaaaaaagctagtcaatcagtagcacgattaagtacagctagtaaaaatgagatactcagggacttagcgagaaacatagtggctgatactgaaaccattttgactgagaatgctcgcgatgttgttaaggcaaaagataatggtatctcagaaattatggtggaccgtctacgactaaacaaagaccgcatacaggcgatagcaaacggtatttatcaggtagcagatttggcagatccgattggtcaagttgttagtggttatacaaatttagatggtttaaaaatccttaaaaaaagagtgcctttaggggttattgcaatgatatttgaaagtcgtcccaatgtatcggtggatgcctttagtttagcttttaaaacagggaacgctattattttgcgtggtggtaaagatgctattttttcaaatactgccttggttaattgtatgcgccaaacattgcaagatacaggccacaacccagatatagtacaattagttgaagatactagtcacgttgtagcagaggagttaatgcaggcaacagactacgtggacgtcttaattccaagaggtggtgcaaaattaattcaaacggtgaaggaaaagtcaaagattcctgttatcgaaacaggtgttggaaatgttcatatctatattgatgaatttgcagatttagatatggcagctaagattgttattaatgctaaaacccaacgccctagtgtctgtaatgctgccgaagggttagttgttcatcaagctattgctaagggatttttatctcaattggagaaaatgctcaaagaatcgaaccagtcagttgaatttcgtgccgatgaggaagctttgcaacttttagaaaatgctgttgctgcaagtgagtctgattatgctactgaatttttagactatattatgtcagtaaaagtagtagattcttttgaacaagcaattagctggattaataaatacagtagtcatcactcagaagctatcattactaataatatcagtagggcagaaatttttcaggatatggtagatgcagcggcagtttatgttaatgcttcaacacgttttacagatggtttcgtttttggactcggagcagagattggtatttcgactcaaaaattacacgcgcgtggaccgatgggattagaagctttaacaagtacaaaatactatattaatggaactggtcaagtaagggaatagttgacctataataggagagattgcatttatcggtctctcttttacttttctaaagtttaggatttatggtacaattaaagttatgacaaacgattttcatcatattactgtgcttttgcacgagactgtggatatgcttgatattaagccggatggtatctatgtagatgctactttaggtggggcaggacacagcgaatatcttctttcacaattaggcccagatgggcacctttacgcatttgaccaagaccagaaggctattgacaatgctcatatacgtttaaagaaatatgtggataccggtcaagtaacctttatcaaagataatttcagaaatctatcttctaacttaaaagcattaggagtgtcggaaattaatggtatttgttatgatttaggtgtatcaagcccacagctggacgagcgtgaacgcggtttctcatataaacaagacgccccccttgatatgcgaatgaatagagagcagagtcttacagcttatgacgttgtgaacacttatagttatcatgatttagtaaggattttctttaagtatggcgaagataaattttcaaaacaaattgctcgaaaaattgagcaagtacgagctgaaaaaacaatatctacaacaacagaattggctgagattatcaaatcgtctaaatctgccaaagaactgaagaaaaaaggtcatccagctaaacaaatttttcaagctattcgtattgaagtcaatgacgaactaggagctgcagatgaatctatacaacaagcaatggacttattagctgttgatggtcgtatatctgtcatcacttttcattctttagaagatcgtcttactaagcaactttttaaagaagcatcaacagtagaagtacctaaaggtcttccttttataccagatgatttacaacctaagatggagctcgttaatcgtaaacccatcttaccaagtcaagaagaactagaagcgaacaatcgtgcccattcagcgaaattgagagtagcgcgtcgtattcgataataagaaagaaacttatgacaaatgaaaaacgaactgaagcagtaacacaaactttacaacgtcacatcaagactttctctcgtattgagaaagctttttatggtgctattgtaattactgctattatcatggcagtcggtattatttacttgcaaagtaatagtttacaagttaaacaagaagtaaatcaattaaatagtaaaatcaacgataaacagacagaatttgacaatgctaaacaagaagtaaatgagctttctaatcgtgatcgaattactaaaattgctaaagatgctggtttaacaattcaaaacgacaatatttatcggaaggtggactagtctgtgactttttttaaaaagctaaaaaaaatcttccttgattatgtgatccatataagagataggcgttcgccgcagaaaaatagggaaagagtaggtcaaaatctgatgattttaaccattttcctatttttcatttttatcatcaactttgtcatcatcgttggtacagatagtaaatttggggttaatttatccaaggaagccaagaaagtctatcaacaaagtatgacagtacaggcgaagcgtgggacaatttacgaccgtaatggaaatcctatcgctgaggatgctacgacctatagtctctacgctattatctcaaagaactatacgacagctacaggtcaaaaactatatgtacaaccttctcagtatgaaaaagtagctagtatcttagagaataaattgggcatgaagaaaaatcttgtcctaaaacaactcaatcaaaagaaattgtttcaagtttcctttggaagttcaggttcaggattgtcttataccaagatggctgacatcaagaaaacgatggaaaagtcagatatcaaaggaattggtttttctaccagtccggggcgtatttatccaaatgggatatttgcttcacaatttataggatttactcttcctcaggatgatggagatggaaaaaaattagttggtaatacaggccttgaagcggcacttaacaaggtattatcaggtactgatggtaaagtaacatacgaaaaagaccgtagtgggaatgttcttttaggtactgcaacaacagaacgtagggcggttaatggtaaggatatctacacaactttatcagagcctattcagactgttttagagactcagatggatgttttcgcagaaaaaaccaaaggaaaatttgcgagtgctacagttgtcaacgctaaaacgggtgaaattctagcaacgagtcagcgtcctacttataatccttctacccttaaaggttacgataagaaaaatttgggtacctataacacactactatatgataacttttttgaacctggttcaacaatgaaggtaatgactctagcctctgcaattgattctaagcattttaactctactgaagtgtataacagtgcacaatataaaattgcagatgcgattattcgagattgggatgtcaatgaagggttatcatctggtagttatatgacttttccacaagggtttgcacattccagtaacgttggtatggtaaccttggaacaaaaaatgggacgagataaatggttaaactatctttctaagtttaaatttggttacccaacacgttttgggatgcttcatgaaagtggaggtttgttcccatctgacaatgaagtaactatcgctatgagctcatttggtcaaggtattggtgtaacgcaagttcaaatgttgcgcgcatttacgtctatctcgaatgatggtgttatgttacaaccacagtttattagcagtatttatgatccaaatacagggacttctcgtacagcacgaaaagaagtcgttggaaaaccagtttccaaagaagcagctagtaaaacacgtgattatatggttactgttgggacagatccttattatggtacattatacgcagcaggtgccccagttattcaggtggggaatcaatcagttgcagtaaaatctggtactgcccaaatcgcccaggaaggtggtggtggttatctgcaaggaaaaaatgatactattaactcagttgtggctatggtgccatcggaaaatcctgacttcatcatgtatgttaccatccaacaacccgaaaaatttagtatcacattctggaaagatgttgttaatcctgttttagaacaagcaacagcaatgaaagaaacgatattaaaaccgggattgaatgactcagaacatcagacaaaatataaactatcaaaaatagttggtgaaaatccaggtcatgtagcggaagaattacgtcgtaatctggttcagccaattattttaggaaatggtagtaaagtttctaaagtatctaaaagaccaggagctaatcttgctgagaatgaacagctactagtattaacaaataaactgactgaattacctgatatgtatggttggtctaaagcaaacgttgaacagtttgctaaatggacaggtataaaagtgacctataaaggttcaacctcaggtaaagtaagaaaacaaagtattgatgttggaaaatccatcaataaaattaaaaaaatcaaaattacaataggagattaacatgtttttaagtataatggcaggtgtcatagcatttgtcctgacagttattgccattccgcgcttcattaagttttaccaattgaagaaaattggcgggcaacaaatgcatgaagatgtcaaacaacatctagccaaagcaggtacgccgacaatgggaggaacggtatttttgattgttgctcttcttgtctcacttatttttagtattattttatctaaagaaaatagtggtaatttaggtgcaacttttggtattttatctgttgttctcatctatggaattattggttttttagatgattttttgaaaatttttaaacaaatcaatgagggcttgactccaaagcaaaaaatgtcgctccaactaattgcgggtctaattttttattttgtccatgtgttaccaagtggcacatctgcgataaatatttttggtttttaccttgaagtaggatacttatacgctttttttgttcttttctgggttgttggtttttcaaatgctgtgaacctaacagatggaattgatggtctagcttctatttcggttgttatcagtttgattacttatggaatcattgcttataatcaaacgcaatttgatattttattgattatcgttatcatgattggtgctttacttggcttttttgtctttaatcataaaccagctaaagtctttatgggagatgttggttcacttgcattgggtgctatgttagcagccatttcaattgccttacgtcaggaatggaccttgctttttatcggctttgtctatgtttttgagacgtcttcagtgatgttgcaagtagcatactttaagtatactaagaagaaaactggtgttgggaaacgtatcttccgcatgacaccatttcatcaccatttagaattaggtggtgtgtctggcaaaggtaataaatggagcgaatggaaagtagatgcttttttatgggctattggtattttcatgagcgctattacacttgctattttatatctttaaactttattaggggatgtggtatggactgccagattcccttttgctttcttgtagcctttaatggtataatgaacataataatagtaaggaaatagacatgtcatttaaagattttaattttaaaccatacattcagagggctctcgatgagttaaaattcgtcgatccaactgatgttcaagctaaattgattccagttgttcgttcaggccgcgatcttgtgggggaatcgaaaactggttctggtaaaacccacacctttttacttcctatttttgagaagctagatgaaagtagtgatgatgttcaagttgttattactgcaccaagtagagagttgggaacacaaatttatcaggcaactaaacaaattgctgagcattcagagcaagaaatacgggtggttaactatgttggtggtactgacaaattacgtcaaattgaaaagttgaaagtaagccaacctcatattgtcattggaaccccaggacgaatttatgatttggtgaagtcaggtgatttagctattcataaggcgcatacttttgttgttgatgaagcagatatgactctagatatgggatttcttgataccgttgataagattgcagggtctttacccaaggatgtccaaattttagtcttttcagcaacgattccacaaaaattacagccatttttaaagaaatatttgaccaatcctgtaatggaaaaaatcaaaacagcaacagttatcgctgataccatcgataactggcttttgtccactaaaggacgtgataaaaatgcacaaattttggaactctctaaactaatgcagccctatcttgcaatgatatttgttaatacgaaagagcgtgcagacgaattacattcgtacctttctagtaatggcttaaaagtagctaaaattcatggtgggattgcacctcgtgaacgtaaacgtattatgaatcaggttaaaaacctcgaatttgaatatatcgttgcaacagatttagcagcgcgtggtattgatattgaaggtgttagccatgttatcaatgatgccatacctcaagacctatctttctttgtccaccgtgtcggtcgcacaggccgtaatggcttatctggtactgctataactttatatcagccaagtgacgattctgatattcgtgaacttgaaaaactaggtattaattttattcctaaagtcattaaaaacggtgaatttcaagatacatacgaccgtgatcgtcgtaataaccgtgaaaagtcctatcaaaaattagatacagaaatgattggacttgtgaaaaagaaaaagaaaaaaataaaaccaggttacaagaaaaaaattcaatggaaagttgatgaaaagcgtcgcaaagagcgtagagcaagtaatcgtgctaaggggcgtgcggagcgcaaagctaaaaaacaaagtttttaaaattattaaagtctgaaatcagctcgtttcaggcttttttattgatataaaatctttatcacctgataaggaaatactattatacagatagattttagagtgttagactagtaatatgatattttaggagaattcttatgtttaaaaaaataatattatctattgcaactatagccgcaaccgccagcctagcagtatcagttcaggcgtcagagaaagtagaacttaaagtagctacagattctgacacggcaccatttacttatcaaaaagacgggaaattcaaaggttatgatgttgatgttgtcaaagctgtttttaaaggtagtaagtacaaagtaaccttcaagacagttccttttgatactatttcaacaggtattgatgcagggaaatttgatttatcagctaatgatttttcatacaataaagaaagagcagaaaaatatctcttctcagatcctatatcccgttcaaattatgccgtagtagggaagaaggggagccattacaaatcattaagtgacctctctggaaaatcaaccgaagttttatctggcgttaactatgcacaggttctagaaaattggaataaaaatcatcctaataaaaaaccaataaaaatcaaatatgtttctgggacaactggtgttactagcagattaaaaaatattgagagtgggaaaattgactttatcctatatgatgccatttcatccgactatattgtaaaagaccaatcattaaacttaagcgtttctcctttgaaaggtaaaattggtaataataaggatggactagaatacctccttttaccaaaagataaaaaaggtaaaactctacagaaatttataaataagcgtattaaagttttgaaagaaaatggtactttggcacgtttaagtaaacaatatttcggtggagattacgtttcaaacattgataaataaatcagtgagactataagttttatctttttacatgtgagagtttgcgtgatagaataacggagataagaaagtttagaaaaggaaagtagaaggaatgaatcaatttatcttgacgggtggatggtcttggtataataatttggttagtcaggttccagcggggaaattatttagttggaaggctgttttagatgcaataccctcaattttagagcgattacccataacactattattgacagtagcaggagccttatttggactcattttagctttgatttttgcagtagtgaaaattaaccgtgtcaaaattttatatccgattcaagctttatttgttagttttttacgtgggactccaatacttgttcaattaatgctgagttattatggaattccacttttcttgaaatttttaaaccaaaaatatggttttgattggaacattaatgctataccggcttctgtatttgctattactgcatttgcttttaatgaagcggcttatacaagtgaaactatacgagcggcgattttgtcggttgatcaaggtgaaattgaggcagcacgtagtttagggatgacctcagcgcaagtttatcgtcgtgttattattccaaacgcagcagtagtcgcaacacctactttgataaacacgttaattggtctaactaagggaacctctttagcttttaatgctggtattgttgaaatgtttgcccaagcacaaattatgggtggtagcgattatcgctattttgaacgttatatctctgtggcacttgtttactgggcggttagtttcttaattgaacaattgggaaatgctattgaacgaaaaatggcaattaaggctccacgccatttaactgatgagattccaggaggagtacgctaatgataaaattgagacaattgactaaatcattttctggtcaaaaagtgttagacaaacttgatttagatattgaaaaaggtcaagttgttgctctagtaggtgcttcaggtgcaggaaaatcaacctttcttcgtagtatgaattatttagaagagcctgattatggaacaattgaaattgatgattttaaagttgattttaaatcaatcagtaaagatgacatactaacattacgccgtaagttagccatggtttttcaacaattcaatctatttgagcgtcgtacagctttggataatgtaaaagaaggtttgaaaattgtcaaaaagatgtcagatcaagaggcaacacggattgcaagagacgaactggcaaaggtcggacttgcagatcgtgaaaaatattatccaagacatttatcaggtggacagaaacaacgtgttgctttggcacgcgcattagccatgaaacctgatgttcttcttttagacgaaccgacatcagcacttgatccagaattagttggagaagttgaaaaatctattgcagatgctgctaagcaggggcaaaccatggtacttgttagtcatgatatgaattttgtttaccaagtagcagataaagttttatttttggaaaaaggtcgtattttagagtctgggacgcctgaacaattatttaaccatcctttagaagaacgtacaaaagaattcttcgctagttataacaaatcgtacctataagctaaaatattttgatataatgaaggttagaatgtctaatcttcatttttaattattcttgagttaggctaagtatataagaaagctgcgatatgttttgacaatcgcttgttggatagagatgtttttagaaatagcaaaagtttatttacaaggtttagggcttgccagcataactgttattttagttggtataatttgggtcttttggcgtgccaagaaaaacatagataaaacagctagagaacgccaatctgttctttatgatgtccttctgatagctcttatgacagctccaatacttgcctttgcatttgtagctatcattttaatgataaaagcttagtcagattagttggaaatatagacgctttgctatagaataaaaccataagattcaaaggagaaatagtaatgtatgatactttaataataggttcaggtcctggtggtatgacagcagcgctttacgctgcacgttcaaaccttaaagttgggttaattgaacaaggtgctccaggtggacagatgaataatactgctgaaattgagaactatccaggctacgatcatatctcaggtccagaattatcaatgaagatgtatgagccgttggaaaaatttgaagtagagcatatttatggtatagttcaaagagttgagaacgatggtgatgtaaagcgtgttatcaccgaagatgaatcgtatgaagccaaaacagtaatccttgctaccggagctaaaaacagccttttaggagttccgggtgaagaggaatatactagtcgtggcgtttcttactgtgcggtttgtgatggtgcatttttccgtgatcaggatcttttagttgtgggtggcggtgattctgctgttgaagaagctgtcttcttaactcaatttgctaaaagtgttactattattcaccgacgtgatcaattgagagctcaaaaagtacttcaagaccgagcttttgctaacgaaaaaataaaatttgtatgggattcagtggtcaaagagattaaaggaaatgagattaaagtatctggtgtaactgttgaaaatctaaagactggagaaatctcagagatgactttcggaggtgttttcatttacgttggtttgaaaccacattctagcatggtctcagaattaggtattacggacgagactggctgggtcttaactgatacaaatatgaaaacatcaattccaggactatatgctattggggatgttcgtcaaaaagatctacgtcagattgcgactgctgttggtgaaggtgctatcgctggacagggtgtctataactatataactgagcatttctaagaaatactaaaagtagaaaagactatcgaaaaacgattagtctttctttttattttcatgaaagtaaggtgataaactgaactaccgagatagaaatatgctataatgttagacatatagccttatcctaggctcatgattaaaaggagattgtctgatgtataaagacgatagtttaacactacatactgatttatatcaaatcaatatgatgcaagtttattttaataaaggtattcacaataaaagagcggtgtttgaagcttactttcgcaaggttccatttgaaaatggttatgctgtttttgcaggtttagagcgtattgttcgttatttagaaaatctgagcttttctgatagtgatttatcctatttagaagagttaggttatcctgaagaatttttagattacttaaaaaatttaaaaatggaactgactgtcaaatcagccaaggaaggtgaccttgtatttgctaatgaaccattagttcaaattgaaggtcctttagcacaatgtcagttagtagagacagcgattttaaatatcatcaactaccagacacttgttgctacaaaagcagctcgtattcgttctgttattgaagatgaaccgctattagagtttgggacacgacgtgctcaagaaatggatgcagccatttggggtactagggcagcgattattggtggtgctaacgcaacgagcaatgttcgtgctggtaaaatctttaatattccagtatcaggaacgcatgcacatgctttagttcaaacttatggcgatgattaccaggcatttaaagcttacgcagaaactcataaagattgcgtctttttagtggatacttatgatacccttcgtgtaggtgtgcctaatgctattcgagttgcaaaagagatgggcgaaaagattaatttcttgggagttcgccttgattcaggtgatttagcttatttgtctaagaaagttcgtcagcagttagatgacgccggttttcctaatgcaaagatttatgcttcgaatgatctagatgaaaatacaatcctcaacctaaaaatgcaaaaagctaaaattgatgtttggggtgtcggaacaaaattaattacagcctatgatcagcctgcgctaggtgctgtttataaaattgtttctattgagactgacgccggtagtatgcgagatacaattaaactatcaaacaatgctgaaaaagtatcaacacctgggaaaaagcaagtttggcgtatcaccagtcgagctaaagggaaatctgagggtgattacatcacatttgcagacactgatgtgacacaattagatgaaattgaaatgtttcatccaacttatacttatatcaataaaacagtccgtgattttgacgcagtacccttactggtagatatctttgacaaagggaaattagtttatcaattaccaagtcttcaagaaattcaagagtacggacgcaaagaatttgatcagctttgggatgagtataaacgtgttctgaatccacaggattacccagttgatttggcacgcgatgtttggcaaaataaaatggacctgattgatcgtatccgtaaagaagctttggcaaaaggagaagtaagatgactttgcaagatcaaattatcaaagaactcggtgtaaaacctgttattaatccaagtcaagaaatccgtcgttccgtagaatttttaaaagactatctattaaaacatagttttctaaagacctatgtactgggtatttcaggggggcaagattcaactttagcaggacgtctagctcaactagcagttgaagagttgcgtgctgatacaggggaaaactatcaatttatagctattcgtttaccatatggtattcaggccgatgaagaagatgcacaaaaagcattagattttatcaagccagatattgctttgaccattaatattaaagaagctgttgatggccaagttagagctcttaatgcagcaggagtagagattacagactttaataaaggaaatattaaagctcgtcaaagaatgattagtcaatatgcagttgcaggtcaatatgctggagcggttattggtactgatcatgctgcagaaaatattacaggttttttcaccaaatttggtgatggaggtgctgacttattacctctctttagacttaataaaagtcaggggaaacagttattagctgaacttggtgctgataaagccttgtacgaaaagattccaaccgcagatttagaagaaaataaaccaggaatcgctgatgaaatagcccttggagtaacctaccaagaaattgatgcttatcttgaagggaaggtggtttcggacaagtctcgaggtatcattgaaaattggtggtataagggtcaacataaacgtcatcttccaatcacaatttttgatgatttctggaaataagaaaaatagctagaatattctagctatttttgtttctctaataaattactttcagacttgcagaaatattcagaatgtttataatagtagctaagtataaaaggaggaatttatgtcaaaattaactcaaacatttacagataagttatttgctgattaccaagcaaatacaaaatttagcgctattgaaaatgcagtaactcacaatggtttattgaagtctctagagactcgtcaaagtgagattgagaacgactatgtcttttcaattgatttgaccaaagatgaagtttctaatcagaaacaatcaggacgttgctggatgtttgctgcactgaatacatttcgtcataaactgatttcagattttaaacttgagaattttgaattatctcaggcacatacatttttctgggataagtatgaaaaatcaaattggtttatggaacaaattattgcgactgcaaatcaggaattgagtagtcgtaaggtgaaattcctattagatgtacctcaacaagatggaggacaatgggacatggtggttgctctgtttgagaaatatggtgtcgttcctaaaacagtttatcctgaatctgtttcatcaagtgctagtcgtgaactaaatcaatatttgaataaactcttacgccaagatgcacagattctacgagaattaatagcacagggagcagatggggcaactgttcaaaataaaaaggaagaattgcttcaagaaatttttaactttttagcaatgaaccttggcttgccaccgcaatcttttgattttgcttatcgtgataaagacaatcattatcagtctgataaaaatattacaccgaaagcattttatcaaaaatatgttaatcttgacctatcagattatgtttctattatcaatgctccaactgtagataagccttatggacaatcctatacagttgagatgcttggaaatgttgtcggagggccagctgttaaatatttaaaccttgatatgaaacggtttaaagagttagcgattgcgcaaatgaaatcaggagaaactgtgtggtttggttcagacgtaggtcaagtatcaaatcgtcaaaagggtatcctagcaactacgacttatgattttaattcatctatggatattaaacttagccaagacaaagcgggccgcctagattatagtgaaagtttaatgacacatgctatggtcttaacgggagtagaccttgatgaatctggacaacctttaaaatggaaagttgagaactcttggggagagaaagttggtaaggatggttattttgtagcttcagatgcttggatggatgaatatacttaccaaatagtcgttcgtaaagaattgcttactaaagaagaattagaggcttacaacgcagagccaattactttagcgccgtgggatccgatgggagcattagctaattagtaatagtaattataaattaaaaaactggataatatatccagttttttaattaccgttaggtactgtattgttgttaccattaccattaccattaccatgtccagttcctggcacagtttgattggaattattaggggtagtagcattaccattattaggtgtttcgacttgtggggatgatgaattggcatcatttgctgtattcttatcctctttttgtttctcagaggatgttgaactactgctttgacttgactgtccagaattttgatagatattcttatagacagaagaagagtaagtgccggttgtagttgtcccattgatatacaagtagcttccgcttcgatagagcccttctggcattgtccaatctgcactgtatccgccagttaggtaggacatcattgcacgataaacctcagtagcaatatccagttggctaccataaagtggtgtaaggcgatttttataaccagtccaaattgccattgtgtacttagaagtatagccgacaaagttttcatcaggagccattgtaccaacggcgctattgtagataccagtagttgcttcaattttagctaactcatcttccgtatagttggaagtaccagtcttaccagcttgtgcaacaccagggatagctgctttagtaccagtaccaaatgttagtactgttttcagcatatccgtcatcatgtaggcagtagtctctttcatcgcacggctaccagacgctgcataagtatcattggttccatcgctaaattcaattttattaacatattgcggtttatagtaagttccgccgtttgcaaaagccgagtaagccgctgccattttctcactacttgcaccatattttgcatcactgctactgttgttacttgaaatagcatttgaatagttcatttctggatagtatatgcctaatttttcaaggaaagattttgcttcgtctaatccagcggcttcaagtgctctgacagcagggacgttacgtgattgttgaatagcggtctgcatactcatccaacccatatattgacgatcccagtcatatagttgagtagaagtaccaggccagtagtaaactgagtcgtttaatgattgacctgttgaattatagacaccactatcaatagcaggtgcataagctgagataggtttcattgtagaaccccaatcgcggtctgttaagacagattgatttgtcccaaatgaaatattttcattctgatgacgcccgcctaattgtgcaatgactttaccattagtcgcatccatgatggtagatgctatttgtaattcattgtttggataagcgatgtaagtgtcactgttgtagatgtcatatagttgtttttgtgcatcagtgttgatattagtatacacttttagcccagcagtaaagatatctttaccagttttttgtttaacttcactaataacttgttttaagtagttatccatatattttggataagtagatttttgctttaattcttttaagccatcagttactggagttgcaacagcttggtcgtattcctttttagaaatgtttttatcttgatacatctgctgaagaacggtattacgtcttgtttgagcagattctgggtttttataagggtcatattgtgtaggtgcttgaggaataccagcgagcaaagcaagttgtgcaatagataattcctttaggtctttaccaaagtatgatttagctgttgttctcataccataattcccatttcccatataaactttattaatatagaaagtaagaatttcttctttggtgtatttacgctccatttgaagcgcaagccaaacttcctgtgatttacgttttaacgtttggtcagatttattggtagaaaagtaagccagtttaatcaactgttgatcaagggttgaaccaccttgcgtattactactaacaagattatgccaagctgcacctaaaatacgataaatatcgacacctctatgtttaaagaaacgtttatcttcgatagaagtgatagcgttaaccaaatttagtggaatgctatccgcactaacactttcacgcttttctgagcctaaatcggcaataagtttattattaccatcataaaccaaactagagttaacggattttaaagcttgatcggttaatttcggagaacgactaacgtagtatgcaaataggagcccacctattacaatagctaagataataaatcccattataatgccaaaagcatacttcaatagtttgataacagattcctttttaattgtaatcaccgcctaataatttttcttcaataatatctaagtaagggacttgaggaaaggcactctcctttacgaaaaatccattttttctgatataatcaataggcattgatttattgcctttatcaatctgataaaatgaaattaactcattagcagggagtagataggtttccttaagtgtggaaaaatgaagcaagacaaagcaaatccctttttgctgtaatacatttgccatgtgctctatttggtgagcatgaaaatttttcataggcatagcagttttctgccgggtttctttggcttcaaagtcaatatagtaacctttgtaaacaccagaataatcagtagtagaagcttgtctaaaataagcttctacaatcttagcacgactacgtttaggataatctaccttgacgatttgtactggcgttggtttcttatgaatgacagctaattcgtgagacaaatagtagtcattggttgcattgatagcagcttcaaatgacataccacggttggcaaaatcgattttctttttctttgattttgtaactgttgttttccgaataagctgatgtggatagttaaccatttttctccttgcattacaaataaaatgctaagataagcaaaactattataccataaaattaggatggacaacaaatgaagtcaactattcttgtaacaggttacaaaaattttgaattagggattttccaggataaggatcctcggattactattataaaaaaggctattgataaggattttagacgcttcttggaaaatggagcagactggtttatttttatgggaaatttagggtttgagtactgggctttggaagttgctcttgatttacaaaaagaatatgattttcaaattgcgacaatttttacctttgagaaccatggccaaaattggaatgaggctaataaagctaagttggcactctttaagcaagttgactttgttaaatatactttcccaagctatgaaaacccgggtcaatttaaacaatacaatcattttctcattaacaacacacaaggtgcatatcttttttatgattctgaaaatgaaactaatttaaaatttttgctagaaatgatggagaaaaaggaagcttatgatatttctttcctaacttttgatcgcttaaatgaaatatatgaggaatgatcgttttttcggatatgagaacgttttacgcttgatttttccatttaatttaggtattatttactttgatataaaggataggacttatattaaaacgatttgactggtttggagaatagaatggcaagtattatttatagcccaaaagatatttttgagcaagattttaaagttagtatgcggggatatgacaagaaagaagtcgatgtatttctggatgatgtcatcaaagattacgaaaattatcttgagcaaattgagaagctccaaatggaaaatagacgtctacaacaagctttagacaaaaaagaaagcgaagcttcaaatgtaagaaattcagggacagctatgtataatcaaaaaccgattgcccaatctgcaaccaattttgatattttaaaacgcattagccgccttgagaaagaagtttttggaagacaaattagagaataaggatttctcaaatatgcaatttttggataatcgcgtagtattgagatactatgaggaaagtccatgctagcactggctgtgatgccagtagtgtttgtgctaggcgaaaaaataagcctagggagatagctagctatcttacggcaagcaaaagggctaagtctttggatatgcctgaatagctttgaaagtgccacagtgacgtagtttctagggaaatctagaaagtggaacgcggtaaacccctcaagctagcaacccaaactttggtaggggcatgggatagttggaatgagaacaatctatcctgactgctttgcagtagacagatgattatcgaaagaaacaattcctagttgtttctggaacaaaacatggcttatagaaaattgcataataggttagtggctgagataacatctcagccaatttttaactgtgatgaatacgatagtgtaaaagaggaaaaatgaaagaatcattcaaattaatagcaactgctgctgctggtttagaagccattgttggtagagaaatcagaaacctaggaattgactgccaagttgagaacggtagagtccgtttccacggagatatcaaaacaatcattgaaacgaacctatggctacgagctgccgatcgtataaagattattgtaggagagtttccagcacctacttttgaggaactttttcagggtgtatatggccttgactgggaaaattatttaccgttaggggcaaaatttcctattgctaaagcaaagtgtgtcaagtcaaaattgcacaatgaacctagtgtacaagccatttctaaaaaagctgttgctaagaaacttcaaaaagtctttcaccgtcctgaaggagttcccttacaagaaaatggagctgaatttaaaatagaagtttctattttaaaagataaagcgactgtcatgattgatacgactggatcaagtctcttcaaacgtggctaccgtgcagaaaaaggtggtgcaccaattaaagaaaacatggcagcagctattattcaattatctaattggttccctgataagccattgattgatccaacttgtggttcaggtactttttgtattgaagctgctatgattggaatgaatatagctcctggttttaatcgtgattttgcctttgaggcgtggccatgggtagatcaaagtcaagtacaaaaggttcgtgatgaagctgagagtaaagcaaactatgatattgatttagatatttcaggttttgatttagacggtcgtatggtagaaattgctagaaaaaatgcagaagaagcaggacttggagatgttatcaaattgaaacaaatgcgtcttcaagatttaaaaacagataaaattaacggtgttattatctccaacccaccatatggtgaacgactcctggatgacaaagcagtggacattttgtataatgagatgggacaaacatttgcgcctttaaaaacttggagcaagtttatcctaactagtgacgaaggatttgaaaaaaaatacggctcacaagctgataaaaaacgtaagctttacaatggtactttaaaagttgatttgtaccaatattacggtgaacgtgtgagacgtcaagtaaaataacggggagaactcatgtcagaagatcaaaaacacccattttttgaaccaaaaaaagaaactgatggtcttgaatttaaagatgctaaagaaatgacagtagaagaggctgttagaaaagattctgaaattaaggctggtattaccgaagaagatagtattcttgataaatacatcaaacaacatcgtgatgaagtagcttcacaaaagtttgagacaaaatcaagcgattttgcaaaccttgatacggcatctttagatgattttatcaagaaacagcgcgaagaattatcagcgatgttagctgcagaagagctttctaaaaagttggataattcagtctctcaagaacaagatacagaagctaatgctgtctcacctaaagaagaatcttcacaagaacaagaaaatagtgtaaccccagttcctcctctgaatacggaagcagaaccaactgcaacagaaccagattcgactattgctgattcagaggagtataaatcctcttctaagaagcgtggaggtatcgtaggaacattgattgctcttattttacttctaatagtagcaatctttggttacaactatttcaagaataataattcgacaaattctcaaactgcaacaagtcaaagttctagttctaaggctacgacgacttcatcagaagaagataaaaaagctagtcagaacttagataatttcaacaaatcttatgctaacttttttgttgatgataagaaaacccaactcaaaaatagcgaatttgataaattgtcagaattagaaaagaaagttgatgctttaaaaggaactaaatactacggtaaagtaaaagttaaatttgatagtctaaaacgtcaaattgatgctgttaaagctgttaacgacaagtttaagtcgcctgctgtagttgatggtaagaagagtgaaaaattagaggtaaaagatggagcgaattttgactctttagatagtaaaactcttaatactggtaatgctagtctagatagtttacttcactccatcgtttcaactggtcgtaatcaggtaaaacaatccgaagaacaggcttcgtctaataaggtttcagacactcaaataactgaacaaccaaacgtaactaacggtcaatcttcctcatcagctgctacaataaataatcaggcagctggcactgcatcaggtaatttggaacgtaaccgtagtcgagtaccgtataataatgctgctattgcggatacaggaaatcctgcctggatatttaacccaggagtattagagaaaatcgtggccacttcacaggcgcgaggctatttctctggaaataactatattcttgaacctgtaaatattatcaatggtaatggttattacaatatgtttaaattagatggcacttatttgttctctatcaatgccaagacaggttactttgtaggtaacgctcctggaagagctgatagtttagattattaatataaagaacaaaaccagttttttgtctacaccctaaaagttagaaaatcagtctaacgattagggtgttttttgtattcgcatttagatgtctacgactgctatgaggatattagggaaaaattaaaaggattttgctctctatgatacagaacaaaatcctttgtttaaattaataagtcaacttttggaattccaaaagttgacttttattttttattagatcagacaatgtggcgctcaaaagcattgtcagaaatcccttgggaaagaattaatttcgcccattcttgagcagagtggagactgtggtctttataatttccacaagattcaatggttgttccaggaacgtcttcccaagtgaccccaccagcaatagcctctagactagatttgatgactttagcaatttcagtagcatcctgttttccccacataatcatgtgaaaaccagttctacaaccaaaaggagaacaatcaatcaaaccattaattcgttggcggattaacttcgccagaaggtgctcgatagtatgtaaaccagcagtatcaatagcattttcattaggctgaataaggcggatatcaaagttagtaatgatgtctccgaccggtccaacttcttctgaaattaaacgaacgtagggtgctttaacgatggtgtgatctaattcaaaactctctacgacaacttcttttgtcataagttttctccttttgtattacattctagagactaaaggagatgttgaaaatttctcctaatccctttaaataacattctaatcatatcataaatgtctataattttaaattgtgaaaacgccttttttatgataaacttaaaagtggactttctatatgaaatctagaaaaaaattgaggtataaacatgtttaatattatattagcaatggtttgtgcactcattggtttgattattggttatgtggctatttcaatgaaaatgaaatcatcaaaagaagctgcagaactaactcttttaaatgcagaacaagatgccgttgatttacgtggtaaagcagaaattgaagcagaacacatccgtaaagcagcggaacgtgaaagtaaagctcaccaaaaagaattacttttagaagcaaaagaagaggctagaaaatatcgtgaagagatcgaaaaggaatttaaatctgatagacaagagttgaaacagatggaggcacgtttaacagatcgtgcatcatctcttgatcgtaaagatgaaaatctatctaacaaagaaaaaatgttagatagcaaagaacaaagtctaaccgataaatctagacatattaatgagcgcgaacaggaaattgctactttagaaacaaaaaaagtagaagaattgtcacgcatcgcagagcttagtcaagaagaagctaaagatatcattttagctgataccgaaaaagatttagctcatgatattgcgacacgtattaaagaagcagaacgtgaagtaaaagatcgatcaaacaagatagcaaaagacttgctagcccaagctatgcaacgtttagctggtgaatatgttactgaacaaacaattacaactgttcatctccctgatgataatatgaagggacgtatcattggtcgtgaaggacgtaatattcgtactctggaaagtttgacaggtattgatgttatcatagatgatacgccagaagtcgttgtcttatcaggtttcgaccccattcgtcgtgaaattgctcgtatgactttagaatctttgattcaagatggacgtatccatccagctcgtattgaagagttggttgaaaaaaatcgtttggaaatggatcaacgtatccgtgagtatggtgaggcagcagcttatgagattggtgcaccaaatctgcatcctgatttgataaaaattatgggacgtttgcagttccgtacatcatatggtcaaaatgtacttcgtcattcagttgaagttggtaaacttgcaggtattttggctggagaactaggagaaaatgttgatttagctcgtcgggctggattcctccatgatatggggaaagctattgatcgcgaagttgaaggcagtcacgttgaaattggtatggaatttgctcgtaagtacaaagagcatccgattgttgttaatactattgcaagccaccatggtgatgtagaacctgacagcgttattgcagtaattgttgctgctgcagacgcccttagttcagcacgaccaggtgcgcgtaatgagtcaatggaaaattatatcaaacgtctgcgtgatttagaagaaattgctaatggctttgagggagtgcaaaatgcctttgcacttcaagccggacgtgaaattcgtatcatggtacaacctggtaaagtttctgatgatcaagtagttattatgtcgcataaggtacgtgaaaaaatcgaacaaaacttggattatccaggtaatattaaggtaacagttattcgtgaaatgcgagctgttgattttgcaaaatagtcaaaaggagagcttgttagctctccttttgttatagagttgacatttgtcatattttgaaatgacaaaaatatctaaaaagtttacttctgattttttatactatgattatagtaaaggagaaccaaatggcaaaagatataattaaggttgatcatatatttaaaagcatcgggcaaaaaacgattttagaagatatatcatttagtatagcttctaaccaatgtgtagcattgattggacctaatggtgcagggaaaacaactctgatgtcaactttgttaggtgatattagtatttcttcaggatcattgacgatttttaatctgcctgcacaccacaataggttaaaatataaggtggccatcttaccacaagaaaatgtattgccctcaaagtttacagtgagagaactcattgatttccaaaggtgtttatttccagaagtgctgccaatgtctctgattttagactatctacagtggagtgatacgcacttgcaacaatttacagagactttatctggagggcaaaaacgacttttagcttttgttttaactttggttggtaagccccaattactatttttagatgaacctacttccggaatggatacttccacacgtcaacgattttgggagctgattgcgacactaaaaaaagaaggtgtcacaattgtctattctagtcattatatcgaagaggtagaacatacagctgataggattttagtacttcataaaggaaagttattacgcgatacaacccccctttgccatgaagcaagaaaaaaccgaaaagttattcaccgttccgcttagttatcaaaaattattacctacctatttgattacagagtgtgaagccaagagtgatagtataacgtttgttactggggaggctgaagctgtatggaaaatactggcagataatggttgtcctattgaagctattgagatgaccaatagaactttgttaaatcgtatttttgagactactaaggaggtaaaacatgagaatctttaaagcattattgaaaatggaatttcttttgacaaaacgtcaacttgccaatctcattatggctataggtatgccagtggctttttttctatttttttcaggatttatgggcgaaggactcactaaagccatcgaagctatctacgttcgtaattatatgataacgatggcaggattctcaagtcttagctttgctttttttacttttccattttctatgaaagatgatcaactctcaaaccgaatgcaattattaagacactcaccagtaccaatgtggcaatattatctagcaaaaattattcgtattttattttactattgcctagcaataactgttgttttcctaactgggcatattttaaggcaagttagtatgccaatagaacaatggatgcagagctttttattgctattaggaggagcaacatgttttattccttttggattgctcgtctcctactttaaaaatactgaactaatgtcaatggtagccaatatttgttatatgtcattagctgttcttggtggcatgtggatgccaattacaatgttcccaaaatggttgcaagctttatcaaagttaacccctacttaccatttgactcaagttatccttagtccgtttgctaatagttttgctggtttttctcttattattctgataggctatggtattataatgttagttatcgcttatctactatctcagaagaggcattcaatttgaaaaataaaaaaaataactatgatttaatgtattttattccgttagtatttttgatttaccccataggagggattctctattatcactaccctttttggactttattttttacgctagcttttgtaggagcatatttatactctgttattatcaggggcgaatcaaagtatcacatgattgcctggtctacaatgttgacatatattttctacatgacaatttttataaatagtggtttcatctggtatatttactttctgagtaatttactcgtctatcgctttagagataaattgaagtcttttagattcattagttttgcttgtactctagccacagtggtatttttatgcttctttaaggcatcagactttggtgatagaatcatgtttctaattgttcctattttttgtatcggttacatgtggattgctattgaaaatagaaatagcgaagaacaaagagaaaaaattgcagagcaaaatcagtatatcaatattttgtcagctgaaaatgaacgtaaccgtatagggcgtgatttgcatgatagtttaggacatacatttgctatgatgacactaaagacagaactagcgttaaagttgttagaaaaaaggaactatgataaggtacaaaaagaactatcagaattaaatcatattagtcatcaatcgatgagtgaggtccgtcaaattgtttctaacctcaagtatcgtacagtagtggaagaaattgatgagttgtaccgcttgtttcaattatctaacattaagttaacagttgttaataagttagagacgtcacaactaagtccagtaacacaatctacaatcacaatgatattaaaggaattatccaataatattgttaagcatgctgaagctgatagcgtggagttgagtttagtaaggcaaggtgctactataaatattgagatgattgataatggttgtggttttacaaaccttgacggagatgagttgcatagtattcaagagagattaactatcgttgaagggacactaacgattttgtcccgaagtaaaccaactcatattcaggtggtattgaaagaggtataagatgaaattacttgttgctgaggatcagtccatgctacgagatgctatgtgccaattacttttgatggaagaaagtgtttctactattgatcaagctggaaatggtggagaagctattgccattttatccaataaagccatagatgttgcaatattggatgttgagatgccgatattatcaggtttagatgtcttagagtgggttagaaaataccagaatgttaaggtcataattgtaacaacctttaagcggtcaggttatttccaaagggctattcgttcaaatgtagatgcttatgttttgaaagaccgctcagtagctgatttgatgaaaacgattcaaaaagttttatctgggggtaaagaatattcgcctgaattaatggaaaacgttatatctaatcctttgagtgagcaagaaataaaaattctttccctaattgctcaagggaagaccagcaaataaattgcatgcactttatttttatcgaatggtacagttcgtaattacacgtcaaatatttttgataaattaggagttaataatcgtttggaggcacttaaaatagcacgagaaaaggattggctgtgatagtttttttccagtcgagatgccataatgtattaagagggatgtatgtatgcaaaaatttaaagaacgttttgatacgcttagtgatgcaattttggccattgctatgacgattttagttttggagataaaaactccggctacgatgggtgatattggtgactttacacggaacataggtttatttattgttagctttgttgttgtttttaatttttggtacgaaagggcacaaaatagcctagatgctcaaaagactaatgatgaaattatagctcttgatatcattgaacacctaggtatttgtttgattcctctctttactaaatttatgatttcttttgagaatcataattttgctgttatggcttatggactcttaacgttattagttggtctcacatcagacattattcggattcgtttggcaagttatgatttagtgaccattcctagtgaattgaaagagcgggttataaaagtcatgacaacttttgccattcgttcagttgtggttcgctttatcatcattatcctcgcttattttctacctgaggtagggatatttgcatatttagtcataccgctctttatgttttggcgtcgctctagagcaggaaaatactatgctaaaaagggcattgaggcaccatcttatatcaagctttttatccaaattggagagagagctcctgaggattttactaattcaagtagtggaataggtggggtaaaaagactctataaaaaataataggagaccttgaaaaaaaggtttctttttgttaaactaatgagaagaaactttatttagggagcaatttatgaattgctataaaagttaatagttaaggtaagaaccagattgttctggtctttttaacacttaacacccgatctattaatttgaggagtgtgtaatgtctgaacgtggtttgctaattgttttctcaggaccatctggtgttggtaaggggacagttaggcaagaaattttttcaacccctgaccataaatttgattattccgtttcaatgactactcgtccacaacgcccaggcgaagttgatggagttgattatttcttccgtacacgtgaagagtttgaagcgttgattaaagaaggtcaaatgcttgagtatgcggagtatgttggtaactactatggaactcctttaagttatgtcaacgagactttagacaaagggattgatgtttttcttgaaatagaagttcagggagcgcttcaagttaaatcgaaggttccggacggtgttttcattttcttaacaccaccagatttagaggaattagaagagcgtttagtaggacgtgggacagatagtccagaagtgattgcccaacgtattgaacgtgccaaagaagaaattgctttgatgagggagtatgactatgctgttgtcaatgatcaagtgtcattagcagcagaacgtgttaaacgtgtcattgaagcagaacattatcgtgtggatcgtgttattgggcgttataccaacatggtcaaagaaactgataaaaaattaagttaaaaatagaaaagagaattgccttatgatgttaaaaccttctatcgacactttgttggataaagttccttcaaaatattctttagttattttacaagctaagcgtgctcatgaattggaagctggtgagaaagccactcaagattttaaatctgtgaaatcaacacttcgcgctttagaagaaatcgagtcaggtaatgttgtaattcacccagatccatcagcaaaacgtgcctcagttcgcgctcgtatcgaagctgaacgccttgctaaagaagaagaagaacgtaaaatcaaagagcaaattgctaaagaaaaagaagacggcgaaaaaatttaagcaagtcaaaagtgagaggttgaaacattctgtatcagcctcttttcatattttagagaattagggagggtttatggcaagaaaattagcacaggttattgttgatattcctctgatgcagacagataaaccattttcgtatgccattcctaaagatttggaagatttggtacaagtaggagtacgcgttcatgttccttttggaagaggaaatcgtcttttgcaaggctttgttgtcggtttcagagatgatgatgaattagagactaaggatattgcggaggtcctagattttgaacctgttttaaatcaggaacaactagacttagctgatcagatgcgccatactgtcttttcttataaaatatctattttgaaatcaatgttaccaagtcttttgaattcgcaatatgataaactcttgttagcaacagacacattaccatcagaagatagagaagatctatttggtcataaaacggaaattgtcttttcaagtttgtcttctcaagatgccaaaaaagcaggcagattaattcaaaaaggtttcatagaagttcaatatttagccaaagataagaaaacaataaaaacagaaaagatttacaaaatcaacagaactctgttagaaaagagccaaatagcagcaagagcgaaaaagagactggagttgaaagaattcctgttagaaaatcctcaaccagggcgcctcacagctttaaacaaacaattttcatctcctgtggttaattttttcagagaagaaggaatcattgaagtcattgaaaaagaagctagtagatctgataattattttaaaggaatcctaaaaacggattttttggatttaaatcaggaacaagctaaagtagttaaaatagttgttgaccaaattggtaaggaacagaataaacccttcttgttggaggggattacagggtctggtaagacagaggtatatcttcatatcattgataacgttttaaagttgggaaaaacagcgattgttctcgttccagaaatttctttaactccccagatgacgaatcgttttatttctcgttttggaaagcaagttgctattatgcactcgggcttgtcagaaggtgaaaaatttgatgagtggcgaaagataaaatcaggtcaagctaaagttgtcgttggagctcgttcagcaatttttgctcctttggaaaatatcggagccatcattatagatgaggaacatgaatcaacttataagcaagaatctaacccaaggtatcatgcgcgcgatgtggccttgctacgtgcagaatattataaagctgtgttactaatgggatcagcaactccaagtatcgaaagccgagctagagctagtcgggatgtttataaatttttagaattaaaacatcgtgctaatcctaaagcacgtattcctcaggttgaaattattgattttagaaattttattggtcaacaagaagttagtaatttcacatcatatttactagataaaatccgagatagattagataagaaagagcaagtggttcttatgctcaatcgtagaggttattctagttttattatgtgtcgagactgcggctacgttgatcaatgtcctaattgtgacatttctctgactttacatatggctacaaagaccatgaattgtcattattgtgggtttgaaaagcctattccaagaacatgtccaaattgcaatagtaaaagtatctcttactatggtactggaacccaaaaagcttatgaagaacttttgaaagttatcccagacgcaaagattttacggatggatgttgatacgacaaggcaaaaaggcggtcatgagtctattttgaagcgtttcggaaatcatgaagctgatattttattgggaacacagatgattgctaagggattggattttccaaatgttactttagttggagtactaaatgcagatacttctctgaatttacctgattttcgatcatcagagcgaacttttcagctattaactcaagtggctggacgtgctgggcgtgctgaaaaagaaggagaggttgtcattcaaacttataatcctaatcattatgctattcaattagcccaaaagcaagattttgaagctttttatcaatatgaaatgaatatccgtcgacaacttggttatcctccttattattttacagttggtttaacattatcgcataaagatgaagagtggttaatacgaaaatcttatgaagtattaagtttattgaagcaaggctttagtgataaagtaaagttgttaggtccaacgccaaaaccaattgcaagaacacataacctttatcactaccaaattattatcaagtatcgatttgaggacaaccttgaacttgttttgaatcgcttattagacatgactcaagacaaggagaatagagatcttcgcttagcaatagaccacgaaccgcaaaatatgatgtagaatagtgctatgatataattgagaaaagaaagacgaggaaaaagcaatgacaaaattattattcatggggacccctgatttttcagcgacggttttaaaaggtattttagcagatggtaagtatgatgttttagctgttgtgacgcaaccagatcgtgctgtaggtcgtaaaaaagaaattaaaatgacccctgtaaaagaagtggccttggaaaacaacattcctgtgtatcagccggaaaaactatctggaagtccagaattagaacaactaatgaccctaggtgcagatggtattgtaacagctgcttttggtcaattcttaccaacaaagcttttggaatcggtaggttttgcaattaatgtacatgcttctctattgccaaaatatcgtggtggggcaccaattcattatgccattattaatggcgaaaaagaagctggggttaccatcatggaaatggttgcaaagatggatgcaggggatatggtatcaaaagcttccgttgagataactgatgaagacaatgtagggacaatgtttgatagactcgccgttgttggtcgtgaccttttattagatacgcttccaggttatctatcaggtgatattaagccgataccacaaaatgaagaagaggtaagtttttctcctaatattagtccagatgaagagagaattgattggaataaatcatcgcgcgacatttttaaccatgttcgagggatgtatccatggccagttgcacatacccttttggagggaaatcgttttaaactttatgaagtaacaatgtcagaaggaaagggctcaccgggtcaagtgatcgctaagacaaagaactcattgacagtagcaactggtgacggagctattgaactcaaatcagttcaaccagcagggaaacctcgtatggatataaaagactttttaaatggtgttggtcgtaatttagaaataggagataaatttggcgaatgattggaaaaagagtgcgcgtggtttagctttaatgactttagaggaagtttttgataaaggagcttattctaatatcgcacttaataagagtttaaaaaaatctagactatcagataaagatcgtgccttagtaacagaaattgtctatggaactgtggctagaaaaataacgctagaatggtatctatcacactttatagttgatcgtgataagcttgaattatgggtatatcatctcttgctactgagcctttatcaactactctatctggacaacatcccagatcacgctattgttaatgatgctgtcactattgctaagaatcgaggcaataaaaagggtgctgaaaagttaattaatgccgttttacgaagagtaagttcggagacgctccctgaaattgcatcaataaaacgccaaaacaaacgttactctgttgcttattccatgccagtgtggctcgtaaaaaaattaattgaccaatatggtgagacaagagctttagctattatggagagtttatttgagcgaaataaagccagtcttcgtgtgactgacttatcgcaaaaacaaactatcaaagaaactttaaatgttagagattcacatattgcagagacagctttagttgcagactcaggaaattttgcatcgacatcatttttccaagatggcctcattactatccaagatgaatctagtcaattagttgctccaacactcaaagtctcaggtaatgaccaagtattggatgcatgtagtgcaccaggaggaaaaacaagtcatatcgcctcatatttgactacaggggcagtaactgctttagatttgtatgatcataaattggaattggttatggaaaatgcaaaacgcctaggtctgtcagataagataaaaactaaaaagttagatgcaagtaaagctcatgagtattttcttgaggatacttttgacaaaattttagtagacgcaccttgttcaggtatcgggctaattcgccgtaaaccagatattaagtacaataaagctaatcaagactttgaagcactccaagagattcaattgtctatcctatctagcgtttgtcaaacgctacgtaaaggtggtataataacctatagcacttgtaccatttttgaggaagaaaattttcaagttattgaaaaattcttagaaaaccaccccaattttgagcaagtagaactgagtcatacacaagaggatattgtaaagagaggctgtattagtataagccctgaacaatatcatacagatggcttttttattggacaagtcaaacgtatcttgtagtgtctaggaggaaactgacatcgtcagaaaaaaatatatggaaatatctcttttaacagatattgggcaacgtcgttccaataatcaagattttattaatcaatttgaaaataaagccggcgtcccactaatcatcttagcagatggtatgggaggacatcgtgcaggaaatattgctagcgagatgactgtaactgatctaggaagtgattgggcggagacagatttttctgagttatcagaaattcgtgattggatgcttgtctctattgaaacagagaatcgcaaaatatatgaattaggtcagtcagatgattacaaaggtatgggaactaccattgaagcagttgccattgtaggagataatattattttcgcacatgtaggagattcacgtatcggtatcgttcgtcaaggagagtatcatttattgacgagtgatcattctcttgttaatgaattggtaaaagctggccaattaacagaagaagaagctgctagtcatcctcaaaaaaatattattacgcaatcaattggtcaagccaatccagtcgaacctgatttaggagttcatctacttgaagaaggtgactaccttgtagttaatagtgatggactaactaatatgttgagtaatgccgatattgctacagtactaacacaagaaaaaaccttagatgataagaatcaagatttaatcactctagcaaaccatagaggaggtcttgataatatcactgtggcactagtttacgttgaaagtgaggcggtttaatgattcagattggcaaattatttgctggtcgttatcggatccttaaatcaatcggacgaggtggaatggcggatgtttatctagctcgagatctaattttagataatgaagaggtcgcaataaaagtattgcgaaccaattatcaaacagatcagattgcggttgctcgcttccagagagaagcacgagcaatggctgagctgacacatcctaatattgtcgctattcgtgatataggtgaagaagacggacagcagttcttagtaatggaatatgttgatggattcgatttaaaaaagtatattcaagacaatgcacccctatcaaataatgaagttgttcgaatcatgaatgaagtcctttcagccatgtcactggcacatcagaaaggtatcgtacaccgtgatttaaaacctcaaaatattttattaactaaaaaagggactgtaaaagttacagatttcggtattgcggtagcgtttgctgaaactagtttaacgcaaacgaattctatgttaggtagtgttcattatttatcgccagagcaggcgcgtggttcaaaagcgactgttcagagtgatatttatgccatgggaatcatgctttttgaaatgttaactggccatattccttatgatggggatagtgcagttactattgccctacagcacttccaaaaaccactaccatcaatccttgcagaaaataaaagcgttccacaagctttggaaaacattgtcattaaagcaacagctaaaaagctaacagatcgctataagacaacttatgagatgggacgtgatttatcaactgctctaagctcgacacgtcaccgtgaaccaaaacttgtttttaatgatactgagagtactaagacactacccaaagtaacatctacagtatcatctctaacgacagaacaactgttgcgtaatcaaaaacaggccaaaacaacagaaaaaataactcctgattctgcgagtaacgataaaacgaagtctaaaaagaaggcttctcatcgacttcttggtacaatcatgaaattattctttgcactctgtgttgtaggaataattgtatttgcttataaaattttagtaagtcctacgactattcgtgttccagatgttagcaacaaaacagtagctcaagcaaaaatgacattggaaaattctggattgaaagtaggagctattcgtaatattgagagtgatagtgtttcagaaggacttgtcgtaaaaacagaccctgctgcaggacgttctcgcagagaaggggctaaagttaatctttatattgccactccaaacaagagtttcactctaggtaattataaggaacataattacaaagatatcctcaaagatcttcaaggcaaaggtgttaaaaaatctttaatcaaggttaagcgtaaaattaataatgattatactactggtacaatcttagcacagtcgcttccagaaggaacatcttttaatcctgatggtaataagaaattaacacttacggttgctgttaatgatccaatgattatgcctgatgtaacaggtatgactgttggagaagtaatagaaaccttgacagacctcggattagatgcagataatcttgtcttctatcaaatgcaaaatggcgtttatcaaacagtagtaacacctccatcttcaagtaagatagcaagtcaggatccttattacggaggagaagttggattaaggagaggagataaagttaagctgtatcttcttggttctaaaacaacgaataactcatcatctacgccaatagattcttcggcttcaagctcaacaggaacaactacctcggattctgtaagctcatcaacggatgctagcacttctgatagtagtagcacttctacaagtagttcaacactaccaagtgatagtacaactaatacaggaacagctaacaatccattaactcaataaaattaaaaagaagatgttaaagtcttctttttaatttgctatggcagagaccatgcctagaaaggttctctgccaatatgccaaatttttctctcaataatggtgcaaagtatagggctttttgataaaatacgtcatatagagtaatggaaggattattatgaaaaaatttcagttttttctacttgttgaagccgttgtcttagttatgggattaatgaaaattttatctgatgactggacaagttttatttttattctcgctttgattcttttagccttaagattttataacaacgatagtcgtcataattttctgttaacgacaagtttgttattactatttttaatctttatgcttaacccttacattattgcagccgttgtttttgcagttttgtatgttctaatcaatcatttctcgcaagttaagaaaaaaaatcgttatgctttgattcaatttaagaatcatcaattagatgttaagacaacacgaaaccaatggttaggtactgatcaacacgaaagtgacttttatgcttttgaagatattaatattataagaatctctgggactgatacaattgatttaacaaatgttattgtatctgggcaggataatgttattataattcaaaaagtttttggtgatactaaagtattggttcctttagacgttgccgtaaaggctgatattagttctgtttacggtagtgtacagtactttgattttgaggagtatgatctaagaaatgaatctataaaattgtcacaagaggaagaatattaccttttgaaacgtgtcaaattagttgtaaacactatcgctgggaaagttgaggttagtcgtaaatgaaaaagcaccactactttttagctttcttctatggaagtgtcattatatttgccatttgttttgtcattattgatagtttgggtgttaatttggtgcacctctatcaaacgtctcgtttgtggctgattgaacaattgattttctctattttctttctatctttagcggtaactatccttttattgctaacttggtttttattagatgataatagtaaacgtcaaattaaccataatttacgtcgcattttaaataaccaatcaataaatgttaccgatgatggtactgaaatatcgaccaatattcaacggctctctaaaaaaatgaatttaatgacagcaagtctacaatctaaggaaaatagtcgtattttaaaaagccaagaaattgtgaaacaagaacgtaagcgtattgcacgtgatttacacgacacagttagtcaggatttgttcgctgcttccatggttttgtcagggatagcacagaatgtttctcagctagacgttgatcaggttggctcgcaattattagcagtagaagaaatgcttcagcatgcacaaaatgatttgagaattctgctacttcatttgaggccagttgaattagaaaataagaccctatctgaaggattcagaatgatattgaaagaattgaccgataagagcgacattgaagttgtttatcatgaatcaattctaaccttacccaaaaagattgaagacaatatttttagaattggtcaagaatttatcagtaatactttaaagcattcacaagccagtcgtctcgaagtttaccttaatcaaacagagaatgaattgcagttaaaaatgattgataatggtattggatttgatatggattctgtctatgatttaagttatgggttaaaaaatattgaagatcgagtagaagatttagcaggaaatttacagcttctcagtcagcctggtaaaggagttgctatggatataagattacctttagtaaatcagagtgaggataaaaatggataaaataaaaattgtacttgttgatgaccatgagatggttcgtctcggtttaaaaagttttttaaacttacaagctgatgttgaagtaataggtgaggcctcaaatggtttagaaggcataaaaaaagcactggagttacgtccagacgttgttgttatggacttagtaatgcctgaaatggacggtgtagaagcaaccttagcattattgaaggattggccagaagctgccattttagtcttaacatcttacttggataatgaaaaaatttaccctgttattgaagcaggtgccaaaggctatatgttaaagacctcaagcgcagcagagattcttaatgccattcgtaaagtttcaaggggagaacaagctattgaaaatgaagtagataagaaaattaaggctcatgataaatgtccagctttacatgagggcttaacagcaagggaacgtgatatccttaatttattagccaaaggttatgacaatcaaaggattgctgatgaattatttatctcgttaaagactgttaaaactcatgtttctaatattttgggaaaactaaatgtagcagatcgaactcaagcagttgtctatgctttccaacaccatttggtaccacaagatgatgaataagtgatataatagaggcactatgttaatgaaagtggttagtcatggacgcaaaaactaaatataaagcaaaaaaaataaaggcagtgttttttgatattgatgacacgcttcgtgttaaagatacaggttatatgccaccatcaatcttaaaagtttttaaagctttgaaagataaaggaatcgttgtaggtattgcttcaggaagagcacgatatggcgttccaaaagaagttcaagatttaaatgccgattattgtgtaaaattaaatggagcttacgttaaggacaaggataagaatattatcttccatcgtcctattccagctgaatatgtagagcaatataagaaatgggcggacactgttggtattaagtacggtttagctggtcgtcatgaggcagttttatcagatcgtgatgatttggtaaatgatgcgattgatattgtgtattctgatctcgaagttaatccagatttcaataaagaacatgatatttatcagatgtggacatttgaagataaaggagatagccttcatctacctgaaccgttagctgaacatcttcgcttgatacgttggcatgatcattcttcagatgttgtgttaaaaggaacatcgaaggctttaggtgtttctaaagttgttgaacatttgggcttaaagccagagaatatcttggttttcggagatgagctcaatgatttagaactctttgattatgctggactagctgtggcgatgggagtgtcacacccagaagctcaaaaaaaagcagattttatcacaaaaaaagtagaagaagatggcattttgtatgccctggaggaactaggtttgatagaaaaagaattaacatttccacaagtagatattgaaaatacagaaggtcctgtggctgtcattaaaacaaatcacggggatatgactgtaaaactcttcccggatcatgctcctaaaacggtagcaaactttattggtttagctaaacaaggttattatgatggtattatcttccatcgtattattccagattttatgattcagggtggtgatccaactggtacaggtatgggtggtgaatctatctatggggaaagttttgaagacgaattttccgaggaattatataatgttcgcggagctctttcaatggctaatgctggaccaaatacgaatggcagccaatttttcatcgtccaaaatacaaaaattccttatgcgaaaaaggaattagagcgaggtggttggccaacaccaattgctgagttgtatgctggacaaggtggtacaccgcatctagatcgtcgccacagtgtatttggacaattagtagaccaaagttcttttgaggtacttgatgagattgcggcagtagagactggttctcaagacaaaccattggaagatgttgttattttaacgattgaggttaaagaataaaatgaagattggcgataagttaaagggaacagtcactggcattaggccttatggagcctttgtttctcttgaggatggtaggactggacttatccatatttctgaaattaaaacaggttacattgataatatttatgatgttcttagtgtaggtgatgaagtctatgttcaggttatagatgtagatgaatttacacaaaaagcaagtttatcgcttcggacccttgaagaagagagacatcatattcagcatcgtcatcgattttctaacaatcgtcttaagataggtttcaaaccacttgaggaaaatttacctagttgggttgaggaaggtctagcctacttgaataataaataaacaaaaaacctagatttgattaatgacaagtctaggttttaaatatttaaaagtagcagtgaatattatacttgctaaaaatagcttgataatcgagtagatcctctgggtgtagtgcagcgatctcttccatttcatattgacgattaagtaattgatatttgttttgcccaaattggtggaaaggtaagagttgcacttgacggatatctaggcgatcaaataaacaagcaaattcttcagcatcttctaatgaatcgttaaaattaggtatgacaggaatacgtagcacaatcgttttaccgttggcaaaagcataatgaatgtttttgatgattgaagcattcttaaccatcgtcttttcttggtgtttgaggctattgtaatgttttaaatcggtgtaaataaaatcaacgtattggataagatctatgaattgttcatgtctagtataagcagttgtttcaatagccgtgtggattcccagtgatttagcacgttttaaaattgccttggcaaattcaaattgtgcaaatatttcaccgccagatagcgttatgcccccaccagattcttcgtaaaaatcaatatcttttaaaacttcttcaataatatcatcaaccgatttttcttcgcccacgatgacgctttcattagtaatggcatctctcattgtttctggaaccattttttgcgactcgggattagcacaccaaggacatctaagaggacaaccctttaagaaaacggttgttcgaatacctggaccatcgtgaatactaaaatgttgaatgttgaatacaatacctttttcatttgtcatattattttcctcaatttcattttaagtataccttttatacgtaacaaagtcaattacgaatgaaagtttattgaacttgtttaataaataaaaaatgataaaatagaaaggaggtgtttcatgaatagattagaaaatattattagtttagtatcccagtaccaaaaaatagatgttaatacactctcggagttgttgcaagtttctaaagtaacgatacgtaaagatttagataaactagaaggcaaagggcttttgcatagagagcacggttatgcagttttaaacagtggggatgaccttaatgttaggttatcttttaaccataaaactaaaaaagaaattgctgccttagctgcaaatatggtgtctgacaatgacactatcttaatagaatcaggctctacttgtgctcttttagcagaaaatatctgtcagacaaagcgaaatgtcactattttgaccaactcttgctttattgctaactatttacgagagtatgattcatgccaaattgtcttacttggtggtgagtatcaatcaagttcacaggttacggtaggtcctctcttgaaaaagatgatttcactttttcatgtctcgttagcttttgttgggactgatggttttgatccaaaactaggatttatgggtagagatttaatgcgttctgaagttgcacaagagatggcgaatgctgccgatgaagtcattattttaacagattctagtaagtttaatcagactgcattggtggaacagcttccgttgtcaactgtatcacaagttattacagataaacatccaaattcggaaattgctaatttgttccaagaagcagagattaccattcaatctttattacaagtaccataaaagaggctatttttcttacattttgcacatttgtggcgataatagataaagtgtcatgtcaaattgcacagatgtaacctttttgttaaactgaagcaaatgctgaaaggttatgagtatgaaattagagcgtcaaaaattgttagctaaagtagcttacctttactatatggaagggaaaagccaatctgagattgccaatgaattaggaatttatcgtacaacaataagtcgtatgttagccaaagcgagagaagaaggtcttgttagaatcgaaatttcagattttaatccagaaatttttcagttagaatcctattttaaaagtaaatatcaccttaaagatattgagattgtttcttcgcgaaaagatagcgatacttcagagatagagaaggatttagcacatgtagctgcagctatgattcgaaaaaaaattaaagagaatgacaaggtggggattgcttgggggaggacacttagtaaagtagttgaagcaatgcgtcctcatccggtttctcaagtttcttttgttcctttggccggaggtccaagtcatattaatgcacgctatcacgttaatactctggtttacgaaatgtcaaggcgtttccaaggaagttgtactttcattaatgcaactctagttcaagaaaacgctaatttagcgaaaggaatattaacttcaaaatattttgaggggctaatggataattgggaaaaacttgatgtggcaattgtgggcgttggtggtaaacctaaaagcaatgaacaacagtggcttgaccttttaaatcaagatgattttcaatgcttggatgaagaagcagctgtaggtgaaattacttgtcgtttttttaatcattcaggtgatcctgtgaatcaacatttagctaaaaggacaataggaattaccttagaacaactacagaaagttcctaatagaatagcggttgctcatggcaattataaggctgcggcactcttagccgttttaaaaaaggggtatattaatcatttagttactgatttttccacagccttaaatattttaagattagataaagacacctttgtggatactatatatcaaaagagctaggaataaatcctagctcttttgataatgtttctattaccaagtgaattgttatagaataagcacaaaggtgcgctattgtcataaagggcacaaagtctattgacgatgattaagggacatgttacatttgttttgcgaaagaaaactagaaccttttgtaagaaagtttaaacttataaaaaatcattaaagcggaggtgcttatggaaatcatagtcgcagaccaaattattatggggctcattttgaatgctggggatgctaaacaacatatctatcaagccttaaaacttgcaaaagaaggaaattttgcagaaagtaagattgaaatagaactagcagatagtgcactcctagaagctcataatcttcaaacacaattccttgcacaagaagcaggagggacaaggacagatatctcagcactctttattcattctcaggatcatttgatgacaagtattactgagattaacttgattaaagaaattattgatttacgccaggaattacatattcaaaaataagtaaaggggatcaaatatgataaaaattggtttattctgtgcagcaggtttttcaacaggtatgttagtaaacaatatgaaaatcgcagcggataaagaagggatagaggcacatattgaagcttattcacaaggaaaaattgcagattatgctaaagatttagatgttgcattacttggtccacaagttagctatactctagataaatcaaaatcaatctgtgatgaatacggtgtaccgatagcagttattccaatggcagattatggtatgttggatggtgtaaaagttttgaaacttgctttgagtttattggaaacaagaaaagaggcttgatatgtcaaagtttgatagtcagaaaataattactccgattatgaagtttgtcaatatgcgagggattattgcactcaaagatggcatgctagcaattctaccactaacagttgttgggagtctctttttaatattagggcagcttccatttaaaggtcttaatcaagccatagctaatgtttttggaccagaatggacagaaccatttatgcaagtttattcaggaacttttgcgattatgggcttgatttcctgttttgcaattgcttatgcttatgctaaaaatagtagtgtagaaccgttacctgctggcgttttatcactttcgtctttctttattttaatgaaatcatcttatattcctgtaaaaggagaagcaatagcggatgctatttctaaggtttggtttggcggtcaggggattattggagcaattattattggcttagtagttggtgctatctatacatggtttatccaacatcatattgttataaaaatgccagagcaagtaccacaggcaatagcaaaacaatttgaagctatgattccagcttttgttatctttcttttatcgatgattgtttatttgattgctaaggtaacaactggaggtacctttattgagatgatttatgatatcattcaagtaccgttgcaaggcttaacaggctcactttatggagcaattgggattgctttctttatttcattcttatggtggtttggtgtccatggccaatctgtggtgaatggtattgtgactgctttgttactatccaatttagatgccaataagtctttattagcagcaaatcgcttaacattagataatggcgctcacattgtaacacagcagtttttggatagtttcttgattttatcgggctcaggaataacttttggactagttattgcgatgctttttgcagcaaaatcaaaacaatacaaggcacttgggaaagtggccgcttttcccgcaattttcaatgttaacgagccaatcgtctttggctttccaatcgtaatgaatcctgtgatgtttctgccttttattttagtaccagttttggcagctttaattgtttatggagctattgcggttggttttatgcaaccattctcaggtgttactttaccatggagtactccagcaattatttctggattcatggtaggtggttggcaaggtgcactcgtccaaatagtcattttagctatctcaactgctgtttacttcccattctttaaaatccaagataatattacttacaaaaatgaatgtgaaatggaaaggggatagctagcagataagaggttgaggtgtgtaatgcaccttaacctttttctaaaaatgcacatttgtgcaactttagatgtagcattctattctttattttcttcttgttattttaggatttaggtgctattatatttacgaagaaaaactttttagtttcgaaagaaacaagcggaggctgttatgaccaaacaattactcactcaaaaatatacaaatgatgttcaacaaaattctcaaaagcattttggctatttgacagagcgcatgtattcttatcgcgataaggttcttgataagaaaccattcatagatgcagaacgtgctatcttggtaactgaagcctatcaaaagcatcaggaaaaacctaatgttttaaagagagcttacatgttgcaaaatattttggaaaaaatgacaatctatattgacgatgagacaatgattgtcggtaaccaagcttcatctgataaagatgctcctatttttccagaatacactctagaatttgttgtaaatgaactagacctttttgaaaaacgagatggtgatgtcttttacattacagaagaaaccaaagaacaaattagaaatattgcacctttctgggaaaataataatttacgggctcgtgcgggcgttatgcttccagaagaagttcaagtttatatggagacaggcttctttgggatggaaggtaagatgaattctggggatgctcacttagctgtcaactatcagaagttactagaagaagggcttattggctttgaaaaaaaagcaagaaaagctaaagctgacttagatttaacaaagcctgagagtattgacaaatatcatttctatgattctattttaattacaatagaagctgttaaaacctatgcagagcgttttgctatcctagcaaaaaaacaagctaaaacagcaaatgctaagagacgtcaggaattgttagatatcgctagtatttgtgaacgagtgccctattacccagctgaaacgtttgcagaagccgttcaatcggtttggtttattcagtgtattcttcaaatagaatcaaacggtcattctctatcttatggacgctttgatcaatacatgtatccatatgttaaatctgacttagaagctggacgtgagactgaggattcgatcgttgagcgcctaactaacctatggattaaaacaataactattaataaggttcgtagccaagctcatacgttttcgtctgctggtagtcctctttaccaaaatgtaacgattggaggacaaacacgacataaggaagatgctgttaatcctttatcatttctagtactaaaatcagtcgctcagacacacttaccacagcctaatctaacggttcgttatcatgctaacctagacaagtcattcatgaatgaagctattgaagttatgaaattaggctttggtatgccagcttttaataatgatgaaattattattccatcatttattaaaaaaggagtttccgaagaagatgcctatgattattcagcgattggttgtgtcgaaacagcagttcctgggaaatggggttatcgttgtaccggcatgagctatatcaacttccctaaagtgttattaattacaatgaatgacggtattgacccggcttctgggaagagatttgcgccttcttatgggcatttcacccagatgacctcatataaagaacttaaagaagcttgggacaaaacacttcgttacttaactcgaatgagcgttattgttgaaaatgctattgatattagtctcgaaagagaagtacctgatattctttgttcagctttaactgatgattgtattggacgaggtaagcacttaaaagaaggtggtgcagtatatgactacatatctggtctacaagttggaatcgctaatctttcagactcacttgctgcgcttaaaaaattagtatttgaagaaaaacgcctaaccacattagaagtatggcaagcattgcagagtgattacgcaggtccgcgtggtgaagaaattcgtcaaatgttgatcaatgaagcaccaaaatatggaaatgatgatgactacgcggatagtttagtacgtgagtgttatgatgtttatgttgaagaaattgctaaatatcccaacacacgctatggacgtggaccaatcggtggtattcgctattcaggaacgtcctctatttcagcaaatgtaggccaaggacgaggtactttagcaactccagatggtaggcatgcaggaactccattagctgaaggttgttcaccatctcataatatggacaaaaagggacctacctctgttttgaaatcagtttcgaagttaccaactgatgagattgtcggcggtgtactccttaaccaaaaagtcaaccctcaaaccttggcaaaagaagaagataaacaaaaattaattgccttacttagaacattcttcaatcgccttcatggttaccatatccagtataatgttgtctcacgtgagactttgattgatgctcagaagcaccctgaaaaacaccgcgatttgattgtgcgtgtagcaggttattctgcattctttaatgtcctatctaaggcaactcaagatgatattattgcacgtacagaacatgctctttaggagattattatggaatttttacttgacactttaaatttagaagctataaaaaaatggcatcatatactgccactagcaggtgtaacttcaaatcccaccattgctaagaaagaaggagatatacattttttccaacgcattcgtgatgttcgagaaattattggacgtgaagcaagtttgcatgttcaagtagtggccaaagattatcaaggaatattggatgatgctgctaaaatacgccaagaaacggacgatgacatttatatcaaagtcccagttacgccagatggattagcagcaattaaaacgttaaaagcagaaggttataatattacagccacagcaatatacaccagtatgcaaggtcttttggctatatcagctggagcagactacctagcaccttactttaaccgaatggagaaccttgatattgatgcgacacaagttattaaggaattagcgcaagcaatagagcggacaggttcttctagcaaaattttagcagctagttttaaaaacgcttcacaagtaacgaaggccttatcacagggtgctcaatcaatcaccgcgggaccagatatttttgaatcagtctttgcgatgccatctattgcaaaagctgttaacgactttgcagatgattggaaagccagtcaacactcagaacatatttaacagagaacgccaacttttgaggctgtatctttaacataaaattttttaaagaagaaagaggttgagaatgaaagttttcgcaagtccatcgcgctatatacaaggaaaggatgctttattccaaagtattgaacatatcaaatctttaggtcagactccacttatcctttgtgatgatgttgtttataatatcgttggagaaaggtttttatcttatctacaagacgatttgttaccacatcgtgtttcctttaacggagaagcatctgataatgaaatcaatcgtgtcgttgctgttgcgaaagaaaagaatagtgaccttattattggacttggtggtggaaaaactattgactctgcaaaggcaattgcagataaagttaatttaccagtggtcattgcaccaacagtagcttcaacagatgccccaacatcagcgttatcagtaatctatacagatgaaggagcttttgaaaaatatattttttattcaaagaatccagacttagttttagttgatactcaagtaattgcccaagcgccaaaacgtttactagcttctgggatagcagatggcttagctacttgggttgaagcgagagcagtcttacaaaaaaatgggatagcgatggctggcggtagacagactttagcgggcgtggcaattgcccaagcatgtgagcgtactttatttaatgatagtttacaagctttagcggcttgtgatgccaaagtggttacaaaagctttagaaaatgttattgaagctaataccttacttagtggtttaggttttgaaagtgcaggattagctgcagctcatgctattcataatggttttactgccttgagtggagatattcatcacttaacccatggtgaaaaagttgcctatggaacgttgacgcaacttttcctcgaaaatagaccaaaggaagaaattgatcgctacattaatctttaccaagcgattggaatgccaactacacttgcagaactccatttgggtgatgcaacatatgaagaacttttaaaagttggtcagcaagcaacaattgaaggtgaaacaatacatgaaatgccattcaaaattagtgcagaggatgtcgctgcagccctgttaacggttgaccgttatgtttcaaatcatcaataaaaacaatagaaccaagtgaaattgcttggttctatttgtcgttttaatattttaactaaatagggcttactagtatttaaagagatataaactaaaaaagatcagacaacatatctaatcttttttagttatcgtttactgaagattaaagttattcaaaatcatacaggcttgttgataagtaacgttcgccattatcagggagaagagctaaaacctttttcccttttcctagttgtttggccacttcaatagcagcataaatagcagctgaagcagaaattcctgcgaggaaaccttctagtccgccgatgatacgtcctgtttcaatagcatcgtcagatgtaacgcgaatgatatgatcataagaatctgtagccaatgtttctggaatgaaacctgcagaaatcccttgtattttatgaggcccaggttgctcaccagaaaggattgcagattcatcagcttctacagcataaatagcgacatcaggattgactttttttaatgcacgagagacaccagtaattgtcccaccagttcccacacctgcgataaaagcatctaaacctttttcaccaaaagtctcgataatttccctaccagtcgttttttcgtggatttctggattggcttgattattaaattgcaggggtagccaagcattttgctctgcagaaatttcttttgccttagcaatagctcccttcatcccttcactaccaggtgttagtactaattgagcaccataggcttgaatgattttacgacgttcaattgacatggtttctggcataacaataataacattataccctttagcttttcctacccaagccaaaccgatacctgtattaccagatgtaggttctacgattgtatctccggctttaagaatccctttttgctctgcatcttcaatcatagctagagcgatacgatctttgacagatgaacctgggttaaaggattctaacttaacgtacacctctgcagctccttctggaacaatatgatgtaattgaataatgggtgtatttccgattaagtctgtaatagaattataaatttttgacataagctatacctcttcatgatattggttaagaatattataaaactcacattgattaaagtaaaatatcaattctttatcaagtgatagctattatttatcggtttcagccttaaagggaatttcaacaatttgactcccttcttcagttaacaaagcttttccttggtagaactctgtcaaattagttattgtgtgttcaaattccttagggtcaacgtatattttacaggttacagcttctaaaaattctgtttcaaactcctgaaggtggtgctcttttaggaagttgtcaaaagtttgatattgaggataagttaattgaatacgaataccaatttgttctttaacttctactaccccgatctctttgatggtattagctacgctaccagagtaggcacgaataagcccccctgcgcctaatttgatacctccaaaataccgtgtaacgacggcaacaacatttgtcaggccttgcttttcaagtacggttagcatagggatacctgctgtaccactaggttctccatcatcactagatcgttttatatcccctttttcgccaataaccatagctgaacacgaatgattggctttgtagtgcgctttcttgatttgcgtaatataattacgcccctcctcttcggactctactcgctttagatgacaaataaatcgcgattttttaatttcttcttcgacaattccgtctgattttatcgttttatagttcatagagaaattctacaaaaattcttcaaatttagcaaaaaaatccgaatgaaataatatggaaaattatttaggtaggctttggacaaaagcacaattatctgagcaacttagaaaaattgcaattagcttgccatcttttataaagaaaggaagcgactatatttgtacccgatgctctagttctgttgctaaaaattgccaattaccaactggaaattattattgtagagaatgtatagtttttggaagagttactagtaatgaaaatttatattatttcccacaaaaaacattttctaaaacgaattctttaaaatggaaaggggaactgacaccttatcaaaatgaggtttcagaagagttgttgaaaggtatttcaagtaaggaaaatcttcttgttcatgctgtgacaggggctggtaaaacagaaatgatataccactctgtcgccaaagtaattgatactggaggaagcgtttgtattgccagtcctagaattgatgtttgtttagaattgtataagcgactttcaaacgattttagatgtgccataacattaatgcatggagaatctccttcttatcagagatcccctttaactattgccacaacacatcaattgttaaaattttatcatgcttttgatttgctaattgttgatgaagttgatgcttttccgtatgtcgacaacccgatactataccagggtgtaaaacaggccttaaaggaaaacggaacaagtatttttctgactgcaacttcaacgactgagttagaaagaaaagttgcaagaaaagaactaaaaaaattgcatctagctaggagatttcatgccaatccgttagtgatacccgagatggtttgggtaagtggtatccagaaaagcttgcagacacaaaaactacctcccaaattatatcagttgataaataaacagcgacaaacgagatatcctttgttattatttttcccccatatttcagaaggtcaggtattcaccgaaattttaagacaagcctttcctatggaaaaaattggttttgtttcaagtaagagcacatctaggttaaagttagtgcaagattttcgagataacaaattgtctatcctagtgtcaactaccattctagagagaggagtaactttccctagcgtcgacgtttttgttatacaagcaaatcatcatttgtttacgaaaagttccttggtacaaatttcaggaagagttggaagagcattagaaaggcccgaagggctcctttacttccttcatgatgggaaaagtaaatcgatgcaccaagctataaaggagattaaaaacatgaatcatataggaggattttaatgacttgtttgttatgtcatgaaatagatttatcgcaattaacttttgtggaacttatgcttctaaaaccaaagcaaaacgtaatttgtcaaacgtgcaagggtagttttgaagcacttagtagggagatgggttgccaaacatgttgcaagcaaattccccaaaaacaatgtcaagattgtatttattggggtaaaaaaggtatagaggtaaatcatttttccctttatagatacaatgaagcaatgaaaaaaaatttttctctttttaaatttcaaggggattatttgttgaaagatgtttttacaaaagaaataaaagctgctctaaaaaagtataagggctacactatagtgccagttcccttgagtcatgaaggataccaaaataggcaatttaatcaagtgattgcttttctacaatcggcaaatataccttacaaaaatattctttctaaaaaagatggaggtaagcaatcggctaataataaagaagaaagactcaaacaagttcagcaatttacattaaaaaatgaggctgagttaggggacaaccttttaattgttgatgatatttatacaacaggcgcaacaatagcacaaatcaggaaactattagaagaaaaaggtataaaaaatataaaaagtttttcattagcacgctaaaatcttgcaaattttcatgaaagcggttataataagagtatagaaagcgttaacaacgcaagaaagaggtactcatatgattaaatacagtattcgtggtgaaaacatcgaagtaacagaagctattcgtgagtatgttgagaccaaactctctaaagttgaaaaatactttaatgaagcacaagaattagatactagagtcaacctcaaagtatacagagagaagaccgcaaaagttgaagtaacaatcttaatagattctattactttacgagcagaagatgtttcacaagatatgtatgggtcaattgacttagttgttgataaaattgagcgtcaaattcgtaaaaataaaactaaaattgcgaaaaaatatcgtgaaaagattccagcaagtcaagttttcacaacagaatttgaggctgagccagatgaagaagcagtaagccaaagaattgtacgtactaagaatgttaatctaaaaccaatggatgttgaggaagcattgttgcaaatggaacttttaggtcatgatttctttatctatacagatgcagaagataatacgacaaatgtcctttacaagcgtgaagatggcgaactaggtttaattgaagctaaaggaaattaactttgtaacataatttaaaaaatctcagggttttctctgagatttttttaaaacctattgacaacaaataaaaaattatagtatactaaatgagttcttaagcgaacctaatattgtattatcattttataaacaacttaaaaaaagtagttgacaaagcagaataagtttgctagaatatagaagttgtctcaagagaggcaaagacctttgaaaactgaacaagatgaacgaatgtgcagggtggatttacattgtaaatccgtcaatgacaaaaaacaataaatctgtcagcgagacagaaaagagcaaagctcaaacttttaatgagagtttgatcctggctcaggacgaacgctggcggcgtgcctaatacatgcaagtagaacgctgaggtttggtgtttacactagactgatgagttgcgaacgggtgagtaacgcgtaggtaacctgcctcatagcgggggataactattggaaacgatagctaataccgcataagagtaattaacacatgttagttatttaaaaggagcaattgcttcactgtgagatggacctgcgttgtattagctagttggtgaggtaaaggctcaccaaggcgacgatacatagccgacctgagagggtgatcggccacactgggactgagacacggcccagactcctacgggaggcagcagtagggaatcttcggcaatggacggaagtctgaccgagcaacgccgcgtgagtgaagaaggttttcggatcgtaaagctctgttgttagagaagaacgttggtaggagtggaaaatctaccaagtgacggtaactaaccagaaagggacggctaactacgtgccagcagccgcggtaatacgtaggtcccgagcgttgtccggatttattgggcgtaaagcgagcgcaggcggttctttaagtctgaagttaaaggcagtggcttaaccattgtacgctttggaaactggaggacttgagtgcagaaggggagagtggaattccatgtgtagcggtgaaatgcgtagatatatggaggaacaccggtggcgaaagcggctctctggtctgtaactgacgctgaggctcgaaagcgtggggagcaaacaggattagataccctggtagtccacgccgtaaacgatgagtgctaggtgttaggccctttccggggcttagtgccgcagctaacgcattaagcactccgcctggggagtacgaccgcaaggttgaaactcaaaggaattgacgggggcccgcacaagcggtggagcatgtggtttaattcgaagcaacgcgaagaaccttaccaggtcttgacatccttctgaccggcctagagataggctttctcttcggagcagaagtgacaggtggtgcatggttgtcgtcagctcgtgtcgtgagatgttgggttaagtcccgcaacgagcgcaacccctattgttagttgccatcattaagttgggcactctagcgagactgccggtaataaaccggaggaaggtggggatgacgtcaaatcatcatgccccttatgacctgggctacacacgtgctacaatggttggtacaacgagtcgcaagccggtgacggcaagctaatctcttaaagccaatctcagttcggattgtaggctgcaactcgcctacatgaagtcggaatcgctagtaatcgcggatcagcacgccgcggtgaatacgttcccgggccttgtacacaccgcccgtcacaccacgagagtttgtaacacccgaagtcggtgaggtaaccttttaggagccagccgcctaaggtgggatagatgattggggtgaagtcgtaacaaggtagccgtatcggaaggtgcggctggatcacctcctttctaaggataaggaaacctgccatttgcgtcttgtttagttttgagaggtcttgtggggccttagctcagctgggagagcgcctgctttgcacgcaggaggtcagcggttcgatcccgctaggctccattgaatcgaaaggttcaaattgttcattgaaaattgaatatctatatcaaattccacgatctagaaatagattgtagaaagtaacaagaaaataaaccgaaaacgctgtgaatatttaatgagttttctagttttaaagaaactaggttaataaggttaagttaataagggcgcacggtggatgccttggcactagaagccgaagaaggacgtgactaacgacgaaatgctttggggagctgtaagtaagcgctgatccagagatgtccgaatgggggaacccactagttaatgactagtatccatatctgttaaggatatgagaaggaagacgcagtgaactgaaacatctaagtagctgcaggaagagaaagcaaaagcgattgccttagtagcggcgagcgaaacggcaggagggcaaaccgaagtgtttacacttcggggttgtaggactgcgatataggattaatcattatagaagaattacctgggaaggtaagccaaagagagtaacagcctcgtatttaaaatgatagattaaccttagcagtatcctgagtacggcgagacacgcgaaatctcgtcggaatctgggaggaccatctcccaaccctaaatactctctagtgaccgatagtgaaccagtaccgtgagggaaaggtgaaaagcaccccgggaggggagtgaaatagaacctgaaaccgtgtgcctacaacaagttcgagcccgttaatgggtgagagcgtgccttttgtagaatgaaccggcgagttacgatatgatgcgaggttaagttgaagagacggagccgtagggaaaccgagtcttaatagggcgtcatagtatcatgttgtagacccgaaaccatgtgacctacccatgagcaggttgaaggtgaggtaaaactcactggaggaccgaaccagggcacgttgaaaagtgcttggatgacttgtgggtagcggagaaattccaaacgaacttggagatagctggttctctccgaaatagctttagggctagcgtcgatgttaagtctcttggaggtagagcactgtttgggtgaggggtccatcccggattaccaatctcagataaactccgaatgccaacgagatataatcggcagtcagactgcgagtgctaagatccgtagtcgaaagggaaacagcccagaccaccagctaaggtcccaaaatatatgttaagtggaaaaggatgtggggttgcacagacaactaggatgttagcttagaagcagctattcattcaaagagtgcgtaatagctcactagtcgagtgaccctgcgccgaaaatgtaccggggctaaaacatattaccgaagctgtggatgacacaaaagtgtcatggtaggagagcgttctatgtgtgaagaaggtgtaccgtgaggagcgctggaacgcatagaagtgagaatgccggtatgagtagcgcaagacaggtgagaatcctgtccaccgtaagactaaggtttccaggggaaggctcgtccgccctgggttagtcgggacctaaggagagaccgaaaggtgtatccgatggacaacaggttgatattcctgtactagagtatatagtgatggagggacgcagtaggctaactaaaccagacgattggaagtgtctggtcaaacagtgaggtgtgatatgagtcaaatgcttatatctttaacattgagctgtgacgaggagcgaagtttagtagcgaagttagtgatgtcacactgccaagaaaagcttctagcgatacatatactctacccgtaccgcaaaccgacacaggtagtcgaggcgagtagcctcaggtgagcgagagaactctcgttaaggaactcggcaaaatggccccgtaacttcgggagaaggggcgctgattttagatcagccgcagtgaataggcccaagcaactgtttatcaaaaacacagctctctgctaaatcgtaagatgatgtatagggggtgacgcctgcccggtgctggaaggttaagaggagtgcttagcgtaagcgaaggtatgaattgaagccccagtaaacggcggccgtaactataacggtcctaaggtagcgaaattccttgtcgggtaagttccgacccgcacgaaaggcgtaatgatttgggcactgtctcaacgagagactcggtgaaattttagtacctgtgaagatgcaggttacccgcgacaggacggaaagaccccatggagctttactgcagtttgatattgagtatctgtaccacatgtacaggataggtaggagcctatgataacgggacgccagtttcgtttgaggcgttgttgggatactacccttgtgttatggctactctaacccagataggcaatccctatcggagacagtgtctgacgggcagtttgactggggcggtcgcctcctaaaaggtaacggaggcgcccaaaggttccctcagactggttggaaatcagtcgtagagtgtaaaggtataagggagcttgactgcgagagctacaactcgagcagggacgaaagtcgggcttagtgatccggtggttccgtatggaagggccatcgctcaacggataaaagctaccctggggataacaggcttatctcccccaagagttcacatcgacggggaggtttggcacctcgatgtcggctcgtcgcatcctggggctgtagtcggtcccaagggttgggctgttcgcccattaaagcggcacgcgagctgggttcagaacgtcgtgagacagttcggtccctatccgtcgcgggcgtaggaaatttgagaggatctgctcctagtacgagaggaccagagtggacttaccgctggtgtaccagttgtcttgccaaaggcatcgctgggtagctatgtagggaagggataagcgctgaaagcatctaagtgcgaagcccacctcaagatgagatttcccatgattttatatcagtaagagccctgagagatgatcaggtagataggttaggagtgtaattgtggtgacacatttagcggactaatactaatagctcgaggacttatccaaaaagagatattgacaacgttacggtttcttgttagactatagatattcaattttgagtgaataaggctcaatagttaagtgataattgcctaggagatacacctgttctcatgccgaacacagaagttaagccctagaacgccggaagtagttgggggttgccccctgtgagataaggtagtcgcttagctataatccgccatagctcagttggtagtagcgcatgactgttaatcatgatgtcgtaggttcgagtcctactggcggagtagataaagggagactaactttggttagcctttttttattggaattattatccttaagattggctaacatcttaattgtccgaatttgtcactgataccaagtggttacgattaaaagtggaaaaactatcctatgttctaaataaaatcgtcctaagtaagcttacttaggacgatttgttatctatctaatagtgtaagtagtgtaataggtactatttttggaagaatgtttcatatagtgctttaatagctcttttttcatccttactgtttataacgaacataatggagacttcgcttgaaccttgtgatatcatggtgatattgattttttctcttgataaggcttgtgtcgctgttgcagtgactccaatctgacttttcatattttcacctacaattacgattgtagatagattgtgttggatgtcaacgtaatctacttctagtttacgagttaggtaatttaagatttcttgttctttgattggtgtcaattctttttcacgtaagacaatggatagatcatctatgccagttggcatatgttcaaaactaatatttaaatcctctaaaatttgtagtacttttcggccgaaacctacttctctattcattaagtatttagatacgtttatgctagcaaaacggctatcagaagcgatcccagttactgctatgttactacgagtatgctttaaaactatttttgtaccaggctgttggggattatttgtatttttaataacaagagggattctgccacgataggcaggaagtaaagcttcatcatgtaaaaccgaaaaacccgcataggctaattcacgcatttctttataagtaagctcagggatagcgtgagggttcttaactacacctggatgtgctgcaaatataccatcaacatctgtgaagttctcataaaggtctgcttttatgcctgctgcaattagggatccagtaatgtcagatccccctcttgaaaaggtacaaatttggttatcttctgtgactccaaaaaatccagggataacaagaacctcattgtatagacataagttctcaatcttatcataacttcctggaataattcgtgcattacatggttctttagttacaataattcctgcttcgtttggatgaacatatcttgcaggaatgtcattttgattaaaaaacgttgcaactaactttgcgttgttatcttcaccggctgctaaaaaacaatcatataaaaactgattattttctatgggaagtgaagctagctgctctatagagcgagtaatttcttctgcaatagtgcttcctaaagacaaatcactaataatttcttgataacgattgataatccaagtttggtctttaacaatatctttaccgttaatataattttgataatattgtatcaaagcatctgtcatttttaagtcttcttcgtagcgtttccctggagctgaaacgacaacaaaccgtctagtgtagtctgatttgataatatttagtactttgtataattgttgggaagatgctaaagaacttcctccaaatttgactactttcataggttacctcaagaatgaattttagataaattataacaaaagtcagaaaatttgtcattacctctaaatttaaaagaatgatataatagttacatgtgtaaatataaagcaataatatttgatatggatggtgttctatttgacactgaattattttattataaaaggcgagagcgttttttaaaacaacatggaattacaattgaccatttaccaatgaatttttttattggaggaaatatgaagcaggtttggaaatctgttttaggtgatcaatatgatacctgggatattgataagctccaacaagattatagtcgctataaagaggataatcccttgccatacaaagatttaatttttcaggattgtaaaagagtcattgaaaagcttcatcacaaaggctatcttttgggtctagcttcaagttctactagacatgatatcatgttagcattagaaagttttaatctggatacatattttaaggtaattctgtctggtgaggaattttcagaaagtaaacctaatccagctatttataatagagcagcagaacttttagatattcctaaacagcaaattcttattgtagaagacagtgagaaggggattacagctggtattgcagccggtattgatgtgtgggctattgaagataaatactttggaatgaatcagtcgcaggctaatgtattagtgagcgatctgagtcaattttttgtgaaattagataactattaaaaacgggaagtttaattccgtttttttattttttatcttgccatgaaagctaggtttatgataaaatacaaagcatgataatttgataatcaaattattttttatttttctttcactcttaaagagaggagacattttgaagttcgaaaatataatatatggtattgatggcaacgtggccactattatgcttaatcgaccagatatttcaaatggttttaacatcccaatgtgtcaagaaattattgatgcaataaggcttgtgtctgaaaataaagatgtcatgtttttagtgattgaagcacaaggaccaatcttttcaatcggaggagatttaaaagtgatgaaagctgctgttgagagcgatgatattagctcattaactaaaattgctgagttagttaatcagatatcgtatgatttactacagctagagaaacctgttgttatgtgtgtagatggggctgtagctggtgccgcagctaatattgcattagcagctgattttgttatcgcaagcaagaagagtaaatttatccaggcttttgtgggtgtcggtttagctccagatgcaggaggtttattgttacttagtaaatcaatcggtataactcgtgcagtgcaactagctttaactggagaaagcttatctgctgaaaaagctgaagctttgggaattgtttataaactttgtgaatcagataaaataggtaaaattaaggatcaactattaaagcgtttaagtagacattctataaactcatatcaagccataaaatcattagcttgggaagctgcttttaaagattgggaacaatataaaaagcttgaattacaactgcaagaatcattagcctttaagcaagattttaaagaaggtgttcgggcacacgctgatagaaggcgtcctaattttttaggcaaatagtttgaaaatcaaattatttaagattaaagtcttgcaaataagtttgaactttgatataatttgattatcaaagtttaatgtgaggtggtgatatcttggaatacgatcagattaatagttatttagttgacatttttaatagaatcatgattattgaggaaatgagtttaaagactagccaatttagcgatgtatctttaaaagaaatgcatactattgaaattattgggaaacattctgaggtaactcctagcgatgtcgctcgagaattaatgttaactttgggaactgtaacaaccagccttaataagttagaaaaaaaaggctacattgagcgtaaacggtcaagtattgatcgtcgagttgttcacttgagtcttactaagagaggtaggttattagatcgattgcatagtaaatttcataaatctatggtatctcatattattgaagacctaggtgaagaagacataaaaatgttgacgagcgctttagggaatcttcataaatttttggaggacttagtctagtggtttttgctaaaattagtcaacttgcacattatgcaccttctcaaattattaaaaatgaggatttatcattaatcatggataccagtgatgactggatttcgtcacgtactggtataaaacaacgtcatattagtaaaaatgaaacaacagctgatttggcaaataaggtcgcagaacaacttattgaaaaatccggttattccgctagtcaaattgactttattattgttgcaacgatgacaccagactctatgatgccttctactgctgcaagagtgcaagctcatattggagcgagtaatgcttttgcctttgacttgagtgcagcatgtagtggttttgtttttgccttgtctaccgccgaaaaattgatatcatcaggtagctatcaaaaaggtttagtaataggagcagaaactgtttctaaagtattagactggactgatagagggacagcagttttatttggagatggagctggaggtgtcttgctagaagcttctaaggaaaaacattttcttgcagagtctctcaatacagatggtagtcgtcagggacttcaatccagtcaagtcgggttaaattcacctttctcagatgaagtacttgatgataaatttttgaaaatggatggtagagcaatctttgattttgctatcaaagaagtttcaaaaagtatcaatcatcttatagaaacatcttatttggaaaaagaagatattgattatcttttcttacaccaagcgaatcgaaggattttagataagatgtctcgaaaaattgatatagcacgtgataaatttccagagaatatgatggattatggtaatactagtgcagctagtatccctattttactttcagaatcttatgagaacggtttgttgaaactagatggtaaccaaacaatcctcttatcgggtttcggtggaggtttgacatggggaagtctaattgttaaaatttagttatatatagtgcatagcacatttataaaagattatttaaaatttaaggagctaaaaatggcagtatttgaaaaagtacaagaaattattgttgaagaacttggtaaagatgcagaagaagtaacgttgaacactacttttgacgatcttgatgctgattcgcttgatgttttccaagtgatttcagaaattgaagatgcatttgatatccaaattgagacagaagaaggactaaatactgttggtgatttagttgcttatgttgaagaaaaagtaaaataattaagtcgtaagaaaaaaagaagcaagtgataataaaagatattcttaccaaatcacttattagagtgagtattcaatcaatcgttgatcggtactcactcttcttcttatcaatatagtttgattgtcaaattattaattttaggaaagaaaaatgaaaacacgtataacagaattactaaatataaaatatccaatttttcaagggggtatggcgtgggtcgctgatggagatcttgcaggagcagtttctaaggcaggtggtctaggtattattggtggaggaaatgcccctaaagaggttgtcaaagcaaatattgataaaataaaatctatgactgataaaccctttggtgtgaatattatgcttttatcaccttttgtagatgatattgttgatttggttattgaagaaggtgtaaaagttgtaacgacgggtgcaggtaatcctggtaagtacatggagcgctttcatgaagcaggtataacagtaatccctgttgttcctagtgttgcattagcaaaacgtatggagaaattaggggctgatgctatcattacagaaggaatggaagcgggtggtcacatcggaaaactgaccacgatgacattagtacgacaggttgttgatgctgttacaattccagtcattgccgcaggtggtatagcagatgggcgtggggctgctgcgggtttcatgttaggagctgatgctgttcaggtaggaactcgttttgttgttgctaaagaatctaatgctcaccctaattacaaagcaaaaatcttaaaagcaaaagatatcgacactgctgtttctgctcaggtagtaggtcatccagttcgtgccttaaaaaataaactagtaacaacctatagccaagcagaaaaagattatttagctggccgtatttcaatcaatgagattgaagaattaggagcgggagctcttcgcaatgcagttgttgatggggatgttattaatggttcagttatggcaggacaaattgcaggattaattaaatcagaagagacttgtcaagagattcttgaagatatttattcaggagcgcgtcaagttattctttctgaggcaagccgctggtcagatttataaatacaaataaggagacactatgaataaagtttcatttctatttgctggtcaaggtgctcaaaagttaggaatggctagagatttatatgaaactttcccgattgttaaagaaacttttgataaggcaagtcatgttttaggatatgatttgagagaattgattgataaagacttagacaaattaaatcagacgaaatatacgcaaccagctattctaacgacttcgactgctatttatcgtttaattcttaaagaaattgaacttagaccagatatggttgcaggactttctttgggagaatacagtgctttagttgcttcaggtgctataagatttgaagatgctgtagtacttgttgctagacgaggccaactaatggaagcagcagcacctgctggtagtggcaaaatggtagcagttttaaatgctgatcgtcaaataattgaagatgcttgtaagaaggcttctcagtttggtattgttagtcctgcaaattataatactccaaagcaaattgttatagggggagagtcaatcgctgtaaatgcagctgtagaagaattaaaacaacaaggagtaaaacgtttaattcctctgaatgtttcaggtccttttcacactgctttattgaaacctgcaagtcagaaattgagcgatgttttagataaagttcatttttcagtttctgaaatccctgtaattggaaatacagaggcgcagataatgaaaaaagacgatatcaaatctttattggcacgccaagttatggaacctgtacgctttgatgagtctattgaaaccatgaaaaaaatgggaatgacacaggttgttgaaattggtccagggaaggtactctcaggtttcttgaaaaaaatagatagctcattatcagtacattctgttgaagataaaattggatttaataatcttaaggaattaaactaggggaaaatatgcaattaaaagataagaacatttttattacgggttcaagtagaggaatcggccttgcaattgcccatcaatttgcacaattaggtgctaatattgttttaaatggacgttctgaaatatcagaagacttaatagctgaatttgctgattatggtgtaaaagttattgctatttcaggagatgtttcttcttttgaagatgctaatcgcatgattaaagaagctattgcaagtctaggtagcgtggatgtgctcgttaacaacgctggtattactaatgataaattgatgcttaaaatgactgttgaagattttgagagcgttcttaaaattaatttaacaggtgcatttaatatgacacaatcagtcttgaaaccgatgacaaaagcgcgtcaaggtgctattattaatatctctagcgtcgttggattaactggaaatgtagggcaagctaattacgcagcctctaaagcaggtttaattggctttacaaaatcagttgccagagaagtagcagcacgaggcattcgtgtcaatgccattgctccaggctttatcgaatctgatatgacagatgttatcccagaaaaaatgcaagaagctattttagctcaaattccaatgaaacgtattggaaaaggtaaagaagtagcgcaggtagcgtctttcttagcagaacaagaataccttacaggacaagttattgccattgatggcggtatgacgatgcaatgataaagaggaaataatatgacattacagcgagtagtagtaacaggttacggtgtaacctcacctattggaaacacaccagaagaattttggaatagtcttaaagaaggaaatgttggtattggacctatcactaaatttgattcaagtgatttcatggtcaaaaatgctgctgaaattcatgattttccatttgataaatattttgtcaaaaaagatctgaacagatttgatatgtattccctttatgccttatatgcttcaagtgaagctattcaacatgctaatttaaatttagatgaaattgatgcagatcgatttggtgtcatcgttgcatcaggtattggagggattcaagagattgaagaacaagtgattcgtcttcatgaaaaagggccaaaacgcgtaaaaccaatgacgcttccaaaagctctaccaaatatggcagctggaaatgttgcgatgaggttaggcgctcatggtgtatgtaaatcaattaatacagcttgtgcttcttctaatgatgctattggagatgctttccgtaatataaaatttggtattcaagatattatggtagtcggtggtgcagaagctgctattacaaaatttgccattgctggattccaaagtcttacagcattatcaacaactgaagatccatcaagagcatctattccatttgataaagatcgcaatggatttatcatgggagaaggttctggaatgttggtcttagaaagtttagaacacgctgaaaaacgaggagctactattcttgcagaagttgttggttatggtaacacttgtgacgcatatcatatgacttcaccacatccagaaggtttaggagccactaaagctattcaacttgcactggttgaagctaatattaaacctgaagaagttaactatgtaaatgctcatggaacttcaacacctgctaacgaaaaaggagagagtcaagctattgttgctgcacttgggacagacgttccagtttcttcgactaaatcttttactggtcatcttttgggtgccgcgggagctgttgaggcaattgcaactattgaagcgatacgtcatagttatgttccaatgactgctggaacgacagaattatcagaagatattacagcgaatgttatttttggtcaagggcaagacgctgatattcgttatgccatttcaaatacatttggttttggaggacacaatgcagttctggccttcaaacgctgggaggattaaattggatattcaagagattaaggatttaatgactcaatttgatgagtcaagtctgagagaattttcattcaaaacaagtgacggtgagctgtcttttagtaaaaatgagggaaaagctccacttgtcccaactatgtctcctatgagtcatcaacctgaagcgactccaactatagcaactcctgtctctaatgaagcaggtgagcaaacgaaacaagctactgaagtagtttcagaaatcccagagtcgactgtgactgttgcagaaggtgacgttgtcgaaagtcctttagttggggttgcttatttagcttctggaccagataaacctaactttgtttcagtaggtgatagcgtgaagaagggacaaactttgatgattattgaggcaatgaaggtgatgaatgaagtgcctgccccccatgatggtgtagttactgaaattcttgtagccaatgaagaagttattgaatttggtaaaggattggtacgaatcaaatgattgatataaaagaaattcgtgaggctttacctcaccgctatccaatgttattagtggatcgtgttttagaggtatcagaagatgagatagtcgctatcaaaaatgttagtatcaatgagccttttttcaatggtcattttccagaatatcctgtaatgccaggcgttttaattatggaagctttggctcaaactgcaggtgttttagaattatctaaagaagaaaacaaaggaaagcttgttttttatgcaggtatggataaagtgaaatttaaaaagcaagttgttccaggagatcaattagttatgactgctaagtttgtcaaacgtagaggaactatagccgttgttgaagcaatagcagaagttgatgggaaattagctgccagtggaacgttaacatttgcaataggcaattgaagatagtattgaatttagagggagagaagcatcaaaaatgtttaagaaaatattgattgctaatcgcggagaaattgcagtacgtatcattcgtgcagcccgtgaaatgggaatttcgacagttgctatctattcggaggctgacaaggaatcattgcacacaattttagcagatgaagctatttgtgttggaccagccaaatcagcagaatcttatttaaacgttaatgctatattatctgctgctattgtgactggagcggaagctgttcatccaggttttgggtttttgagtgaaaattctaaatttgctactatgtgtgaagagatgaacttaaaattcattggtccatctggagaagttatggataaaatgggtgataaaatcaatgctcgtacagagatgataaaagctgatgttccggttatcccaggatcagatggtcaagttacaagtgtagaagaagctgtatcaattgctgaggaaatcggctatccattgatgttaaaagcctcagccggtggcggtggaaaaggaattaggaaggtcaaatcagcagatgaattgaagcctgcttttgagtctgcttcacaggaggctttggctgcgttcggtaatggtgctatgtatattgaaaaagttatatacccagctagacatattgaagtacaaatacttggagatagctttggtaagatagttcacctaggagaacgtgattgttctctgcagcgtaacaatcagaaggtattggaagaaagtccgtctgtggcaataggtaacactctgcgtcaacaaattggtgaagcagctgttcgtgcagctgaggctgtatcttatgaaaatgcaggaacaattgagtttttgttagatgagaatagcggacagttctatttcatggaaatgaatactcgtgttcaagtagaacaccctgttacagaatttgtaacgggtgttgacatcgttaaagagcagattcgtatcgctgctggaattcctttatcagtttctcaaaatgatattaagttaactggtcatgcgattgaatgtcgtattaacgcagagaatccacaatttaattttgcgccatgtccaggtaccattaatgggttacatctacctgctggcggtatgggcttacgtgtcgattcagcggtttacacaggctacactattcctccttattacgatagtatgattgcgaaagtaattgttcacggagaaaatcgttttgatgcacttatgaaaatgcaacgtgccttatatgagcttgaaattgatggtattgtaacaaatacagaatttcaaatggatctcatttctgataaaaaagtcttggctggggattatgatacttcattcctgatggaagactttttaccaaggtattatggtaacaatcaataggagggaagatggctttatttagtaaaaaggataaatatatccgtattagtccaaacaaagcattagggtcttctgataaacgtagtcttcctgaggttcctgatgaactctttgctaagtgtccttcttgtaaacatatgatttatcagaaagatttaggattagcaaagatttgtccagcttgttcttacaactttagaatttcagcgcaagaacgtctgttgctaacagttgacgaagatagttttgaggaattatttacaggaattgaaactaaggatcctttgaattttccaaactaccgtgaaaaactggctgctacacgtcaaaagactaacttagatgaagcggtggtgacaggtttagctaaaataaaaggacaaactacggccttagctattatggattctcattttataatggcgtctatgggaacggtcgtaggcgaaaagttgacaagattatttgagctagcaactgaaaagaaattacctattgttatttttacagcgtcagggggcgccagaatgcaagaaggtattatgagtttgatgcaaatggcaaaagtatcggcagcagttaaacgccattctaaccagggattgttttatttaacaattttaacagacccaacaaccggcggcgttactgcgagttttgctatggaaggtgatattattctggctgagccacaagcgttggttggttttgctggtcgtcgtgttatcgaaacaacagtgagagaagatttacctgaaggctttcaaaaggcagagtttttgttagaacatggttttgtcgatgctattataaatcgaacagaattacgcgactgcattgctcaactaattgctttccatggaaatgaggttggtcatgaataatgatgtgacaagaattttaaaagatgcgcgtgatcaagggaggctaactgctcttgactacgctgaattgatttttgataattttatggaacttcatggtgatcgccagttcgcagatgacaaatcaattataggaggtttggggtacttggcagggcgtcctgtgacgattgtcggtattcaaaaaggtaagaaccttcaagataatttagaccgtcattttggtcaaccacatcctgaaggttatcgtaaggctttacgtttaatgaaacaagctgagaagtttggaagacctgttataaccttcatcaatactgctggagcatatcctggggtaggtgctgaggagcgaggtcagggtgaagcaattgctagaaacctcttagaaatgagtgatttaaaagtccctattatagctattattattggtgaagggggttctggaggagcattagctttagctgttgccgataaggtttggatgttggaacatactgtttattctattttaagtcctgagggctttgcctctattttatggaaagatggtacaagaacaacagaagcagcacaattaatgaagatgactgctggagaactttaccatatggaagttgtagacaaagtaatccctgaacatggttatttttcaagtgagattgtcgatatgattaagacaagtttaatttcagagttagaagtgctctcacaattatctcttgaggatttattggaacaacgttaccaacgttttagaaaatattaatagaaaaaggctgagttatttactcagcctatatttagtttttcaaggtattatcatagttatagtttcatattttgttataattgataaaaaggagatatatcaatgacactagcattagccaatttttagattgtagtctaatccaaaattttcagaaagagtcatttcgaacactttattctaagtaccattatttaggctctccttaacttgagactctatctgttattgaagagaaattttctagaaaaaatagctattattagattttagaaggctatgaaaagattggtttttaaagagttccattaagtgatgaagaaagtaaagcttggttagttataattgcgattagaccttgtttctagcaacgaggcttcgctagaaatactttaaaagaacttgaaagtatgtatagatatatataatcgtgaaaacttaactattgtttacatggagaaaaagaatgtatcaagaattaaatgattatttagaattccaatcaatgaagtatattatgcctgagaaggcaggcgctttaaaggacgatatgcaaacttttaaggcaaagggccaacttgctaggaatagctttacagagttatcaagagccttagaacaacgtatggatggctttaaaatgcaaagagtgagtaattgggctaatcaagctcaagtagggcgtccacatttttgggtttattatcgaaaggatacagaccaattagatgatgtggctgttgcgctaagggtttatggtgtaaaagatagttttggggttagccttgaggtaagctttgtagagaggcaaaaatctgataagacactcgagaagcaggctagagtgttatcgattccgattgcctctccattgtattttatggtccaaaggcaaggtgaaactcatcgagaagaaggcaatgaggaaaatcgtcaacgtttaatgcaagaaattaagtcagggaaggtaaggaaagtattggtaaaatatgacgttcttttgactgaaaaccagagcttagaaaatattctgcaacgattgttagaaggctttgagaaagtgttaccttactatcaagtttgtcaaactattagctaagttcatagaaaaaatgagttggtataccaactcattttagagtgcctaatttggtttaataatatcgatattacccatatatggacgaagaacttctgggatagtcacagaaccatcttcattttgataattttcgaggattgctgctacagtacgtccaactgcaagtcctgaaccatttaaagtatgaagcaacctaactttgccatcaacttcgtcacggtaacgaatttgagcacgacgtgcttggaaatcttcagtattagaacatgaagaaatttctcgataagtattttgagcgggaatccatacctctaagtcatacgttttagctgctgagaatcccatatctcctgtacacaaggtaatgacacggtatgggagattaagtttttgaagaatattttcagcatttgctgtcattttttctaattcttggtatgattcctcaggcttggcaaatttcaccatttctactttatggaattgatgaaggcgaattaatccacgtgtgtcacgtcctgcagagcctgcttctgaacggaatgatggactcatggcagtaaagtatataggtaattctttcccatcgataatttcatcacgataatagtttgttaaaggaacttcagctgttgggataagtacgaatgggctatctgctaattcgaaagtatcttccttgaactttggatattgtcccgtaccgaacattgaatcgtggttaaccatataaggagggatcacttcagtgtacccctccttagcgtgttcatccagcatgaagctgtagatagcacgctctaaacgagcacctagacctttgtagaagaggaagcgagagccagtaacttttgcaccacgttcccaatcgagaattccaaggctttcacctaaatcccagtgagctttggtctcaaaatcaaattcacgaggagttccccagcgacgaacttcaacattttcatcctcgtctgctccaagcggcacatcatcagctggtgtattaggaagtacggtcaccattgattgtaaattagcatccacatctgccaattccgcatcaattgctttgatatcagcggaaagtgtttgcatagctgcgatttgctcgtctgcattctctttatttcgttttgcttgagcaatggcagcagaagcaacattacgttgcgctttcgcctcttcagctttgataagtagttcacggcgttttatatcaagttctttaagggttgttaatgtttcttggtcaacaccacgcgtggccaattttttagcgacaacatcaaaatctgtacgaatacgttttaagtctaacatataggaatctcctttatactaaaaaacaccctgtcatgctggagcgcaaaggcgcggttccatccagcttcacagaagtgcacttgattgattgattaaattatttcccataaatggaacacggtagaatttcataaaacaatcttatctgctcgcaacgaccgcagactctctgaaaagaactattatactacttatccgttaaggttattatatccaaaaataagtaaaatgtaaaccttaactttataagcctgctctttgttttagtgaaatagctatgctaaaatatgattatggaaaagtatacaagtattaaacaatcaggtcgtcattacggcttagaccttttaaggattatttccatgttcatgattgttattacgcatgttcttggaaaaggtggtctgagatcttcggttgagggacacgcagactcctattttatagtaacgtggattatccaagtcttagtttatggggccgttaactgttacgcactaataagtggttatgtgggaattaattcgcgttatcgttactcaaaattactgtctatctgggcacaggtttttttctacacctttacaataacagcactttttgcaatcacaggtcatgaagtgaccttgcttaattggagagatgcttttttccctattgtcagtgggcagtattggtacattactgcttactttggtctattggtttttatgcctgttattaataatggattaaatgccttgactgataaacaattaaaacaattggttttgttaatgtttattattttttcaattttaccagctgttttaaataatcgtgttccagaattttcattgagcaagggttttgaaatgacttggctactgattttatatattattggtgcctatttgaaacgtattgatttaaatatatttaaaacgtcatatttacttataatttatctattatcattggttgctacttatgccatgaagtttagcgttggtgatatttggtattggtatgtttcgcctactttaactttaggggcggtaagtttgtttatattatttgctagagcaagcattaagccctcgggattcttaaagaaaataattgttgtattagccccttcaaccttgggagtttatctctgtcatctccacccactaatagtaaaatattttgtaagagattttgcagagacgtttgtttatgagtccatttatctttacccatttttaattttaggagcagggattttaatttatttgttggcttttattgtagaacgtattagattacgaatatttaaagcaatccatttttctaactttttgagatggtttgatgacaagttcccatattaatattagagttaaaaaataagatagactatagtctatcttattttttaaacttgaatatttttaaaatggtctggatgagggtaggaagcttaacaactttatcgtctccaatatgtcgtctcgcatgctttaatatcgttccagagtctttagaggcgaataaaaattttccttggtctgtaaagacctcaaagtgacgactaattttttttcgactaacattagctccaatttgattgattgatgtccatggaatttgaatatagtcgttgacatttttatcgttatagaattctaatgcctggtcaccaactaaaaattttccaactttattccccatacctaaatacgaaactcctgttgtttgaaattcaacagttttgtttaatgattgtgccatgactaatccctttttaatttatagtagtttgattatatcataatagtgggactctaagtggattttatgtaataaaatataagagatggaatactattgtaaccatctcttagttttattacatcacacctgcaaggcgagctagaataccaacgataaacaaaccgatgataattgtaattggtgatactttcttcttaagtaaccacatacagaagaatgtaagaagtaatccagctaaaccaggaataagtgagtcaagttgtccttgaagtgtttgtggttgcattttatcaaggcttaagccactctgaacttgtcctaggatatcatgcaattgttgtccactaacatggtctttagggaaattgatgtatgccccttctgacaatgtctttttaggaaggtctacagtaaagttaattgctacccaacgcttaacaaggacagcaaggatgaacataccaaggattgaagcacctttagtaatatcttggaggataccaccagacatatctttagtaatttctttacctgatttgtaacctaactcttgtgtgtaccataagaatgacatacgaatgaggttccaaccaacaaagaagatgattggtccgaggatattaccagcagaggcaagtgaagcaccaagagcacctaagataggacgtacagtaaaccagaatactggatcaccaataccagcaagaggtcccatcataccgattttaaccccttgaattgctttgtcttcgacaggtgtaccgcttgctttttcttcctcaagagcaagggttacaccgataattggagcagcaacgtatggatgtgtgttaaagaattccatatggcgctcaagcgcagcagcacgatcttctttagtagtgtaaagttttttcaatgctgggataagagcataggcccaccccatattttgcatacgctcatagttccaagaaccttgaaggaattgtgaacgccaccaaactttttgacgatctgattttgataatttaatttgttcagtcattgtttagctcctttctagtagtcctctaagatatcgccgataggatcgttagaacctgcgttagaagtacctttgcttccacccatttttgataaactgatgtagatgagggcgatagcaacaccaatagtacccattgcaataagagttaactggttcaaagctgctagagcaaatccaagagcaaagaaaggccaaacttcgcgagtagccatcatattgataaccatagcgtaaccaacggcaacaaccatggcaccaccaacttgcataccaccatttaaccaatcaggcattgcttcaagaatactttgtactgaagaagatggaatagctaaaagaagcgcagctgggaatgcaatacgtaatccttggagaaggagggcgataaagtgaaaacgttcaattgctgcgaagtttccttcagaagcagctttgtcaccagcgtgaacaagtgcagttgagattgtacgaacaatcattgtaaggaaaagtccagcaatagctagaggtacagcagtagagaaggcaaagttgatacctttttgagtgaagtcaccacttttaaccaaaataatagcagcagcaacagaggcaagtgcagcgtctggtgctacggcagctccgatatttgcccaagcaagagcaatcatttggagactaccaccaagaataatacccgcttcgaggtgaccagttacaagaccgattaaagtacaagcaacaagaggttgatggatttggaattggtcgaggataccttcaagaccagcaaagaaggcaacgataacgaccaaaatcattgagataattgaaatatccgccattttgatatcctttcgttttcagagataataagttattttacgtttgctttgttgattaaatcaaacaaattctttttagcgtcatttggtactttacgtacatcaaatgatacacctaagtcacgtaatttttcaaaggcagcaacatcgtctttatccattgaaagaacgttgtttaccattgttttaccagttgagtgagccattgaaccaacgttcaattcagggatttccacaccaccttcaattgcacggagtgcatcttgtacagtttcaaataagatcaaggcacgtgtgtttccgaaacgtgggtctttagctacttcaattaatttactaattgggacaacgtttgctttgactcctccaggagcagcttgcttaatcaattgtttacgaagttcatctttagaaacttcatcagaagcaacgataatacggtttgcttttgatgctggagtccatgcagttgcaacttgaccatgtaaaagacgtgtgtcaatacgagcaagattaattttaagcttgccatctccaataacagttccttcagggatagatccactttgtttaacttccgcaggaacatctgcaggaacacctgctacaggagtagcttctacaacaggattaagttcttctggaagggctttgataccttccttagactctttaataatatttgcggcaacttgttcaacacctgcattagcgtccatcatacgctcagtataggcttggataagcattggcaaattgagaccagtgatgatagccattttacgttcaggattttctcccataacacggcttgcttggttaaatggtgacccactccaaaggtcagctaacacaagcacctcatcatcagcatcaaattgtgcgatagcattgttgaagtgtccatacaaatcatctggtccttcatttggcatgaaagttacaacttgaactttttcttgttcaccaaagatcattgaacctgattgatgaataccttcagcaaatttaccatggctggcaataataataccgatacccattcttgttcttcctccttaaaaaattttttcgttgacataaagaagaataatctccttccaatcgtaaaattggccattctttttcatttcaacgaaattatagaacagatatattttaaaacgttttcagaaaaaaatcaatactatttctaataaaaattaaaaaaaaagatatttttttcacaaataccttttataataggggaagagagtggtaactttttttgttaataatatagtagaaaacctaaaaaacgatttctattagaattctgtttcaatagagatcatttttgaaaatactacaataataatttttctagagttttagcaacaccatcttcttcgtttgtccattggatttgttggtcggcatatggaagtagagttggattagcatttttcatagcatatcctgtatgtgcaaaggccagcatctcggtgtcattgtgttcatctccaaaggcaatcaaattttcttgtgaaagattgagtgattttaataaatgtttgagagcataagctttgttaacacctttaggtgaaaattcgagtatattcaatggaccaccccaagaatctacttctagttcgtgattaaaatgttgtcgtaactctttagctaactcatacttatctttatgacgtgtttgcatcaatagagcatttggattgcgtgtgattttagtaacatctaatgccattttatcagtaatttcattgacaccgaataattgtgggttaattttatcacgattatccatagtaatgtaaaaatttttacggtattcgctagcaataaaatcggcttggatagcatctgataaatttaaggtttcaaggagtaattttttatcaatcgttgcactacgctcaaacgcccactttttttcggggatatgagttaaagcaccattaaaatttatcattggtgtttttaaatctaggcgtaaataatgagcgagtgccatacggtatgggcgtccggttgtaataattactttgtgtccttgagcttgaacttttcgaagtgtatcagcggtgtagtcagaaatagtgttattattatgtaatagagtaccgtctaaatctacggcgataattttctttgtcatgctgacattatatcaaaaatagatttcaataaaaagagacagtagaaatatgatataataactgtggaaatatggaagttggtggattatgaaaaagttaatttggagtcatctttttgccatagtcagtattttagggatatggtattatcatgtaaaaattgatcatttgatggtaattctattggcatcagtcttgtcgttagagatgggattcattgcttattatagtcgtaatatttttattcgtcttttagcaagtttaggtcttttatttttttacccacagagtttagggatttttcttagtttggtgagcttagagtggtcaacaaaagacatttggcagtctaatcactttatgcaatatatggcataccttcttgcaattctttttattatctcttcagctttactaagcttgaagctattggtaaatgcatatgatattagtaaaaggtatcaattagcaactgttatacctgtaatgctttttagtagttttgccttttgcttagaaaaatcaggatcattaggtttagaaggaatcattttaaatccgtcagcattttttaatggaatacagactaatatggctaaccttgattttaaagccttgtcttgcctttttttagtacaattattactttggggaatattaatggaagactaaccacaacagggttagtcttttaggtttgaagtttatttaaccttaatttaataatatgttgtataatgagatattaattggaggttagaatgaaagtaaaactatttgcgatacatctattttttattgttatttcttttgggattaaatattatcatttgcagggaccaaatttgatttggaatatgactctagccctaatagcgttagattttgcataccttactagtttatttaagaaaaaaattcttatcggtctttttgcacttgcttggttttttttctatcctaataccttttatatgttgacggatatcattcatatgcattttgtcggagacgttctttataataagacaaatttaatactttatatcttgtatgtatctagtatcttgtttggttttttatcaggtatcgaaagtttttctgtgattatgcgtaaatttagaattagcaatatatttttaagatggggaattattggaattgtatcattagtttcaagttttggtattcatattggtcgttatgcccgtctaaattcatgggatatcttaacgaagccacaagtggtaattaacgaacttttagcggttccgagtagggattcattccactttattttaggatttacatttttacaggtattgtgtcttatttttatggattattctgcagggaaaaagcttgaaaagtgaattattttttgttaatatatattagtcgttcgtaaatataagaacgattattttttttaaaagtgtaaaatagcaaaaaataaaggagaatccgattttaaaatggaaaagttttttaagctaaaggaacacgggacgacaattcggactgaaatcactgctggtctaacgactttctttgcaatgtcgtacattttgtttgtaaatccagctattttatctcagactgggatgccagcacaaggagttttcttagcgacgattattggtgccgttgtagctacatctgttatggctttctatgctaaccttccctatgcacaagctcctgggatgggattaaatgctttctttacatatacagttgtctttgcattgggatatacatggcaagaagccttagctatggtatttatttgtggtttgatttctctgattattactttaacgaaagttagaaagatgattattgagtctatcccaacaactttaaaatcagccattacagcaggaatcggaacttttttagcatacgttgggattaaaaatgctggttttttgaaattttcaattgatcctgggacgtatgatgttgttggaaagggtgctgcgaaaggattggctactattacagcaaattcttcagcaacgccagggctagtgtcgtttgataatccagccattttattatctttgattggtttaagcattaccatcttctttattgtaaagggtatccgtggagggattattctatcgatattaacaacgaccctcttaggtattttaatgggagtggttaagttagatgctattaattgggaagcaactaacctctcggcctcttttagagatttgaagcaagtatttggagttgcattaggagagaaaggattaatttctttattttctaatccttcacgtctaccaagtgtattaatggccattcttgctttttcactgactgatatttttgataccattggaacgctcattggtaccggagaaaaagttggtatcttagcaacgactggtgataatcatgaatctaagagtttagacaaagcactctattcagacttaattgggacaacttttggtgctatttgtggaacatctaacgttacaacctatgttgagtcagcagcaggaatcggagctggtggtcgtacaggattgacagccttagtagttgctggtttgtttgctatatctagtttttttagtccactagtatctatcgttccgagtcaagctactgcaccaatattggttattgttggtattatgatgctttcaaatttaaaagatatcaaatgggatgatatgtcagaagctatcccagctttctttacttctctttttatggggtttacttatagcattacttatggtattgcagctggtttcttgacctatacactagctaaagtcatcaaaggacaagcaaaagatattcatgtggtactgtggattttagatatattatttattctaaactttatcagcttggctattttgtaatattatagtttgataaataagataaaaggaaatcagatttgtagcctggtttccttttttcttaagaaaagtgaagaaatatatgctatggggctgtcagaatcagcaaactgttggaagacagagatatttctggtataatatctctatgttttatactcaaaatgaagaagagcttattgccctagggcaaaaactgggtactgttttaaagtcaggagatatcgtattattgactggtaatttaggtgcaggcaaaacaactcttacaaaaggtattgcaaagggattagacataaaacaaatgattaagagcccaacttacactattgttagagaatatgaagggcgtgtaccactttaccatttggatgtttatcgtattggagatgatcctgattctattgacttagatgacttcttgtttggtcaaggagtaacagttattgaatggggagagttgcttagtgataaccttatcaataactacttagaaattgttattacgaggagcaatcaaggacgtcaggttcagttagaagcttatgggcatcgcgcaagagaaattattgaggcgattcaagatgtctaaacaatttgctgttgattttatagaagcttcgagagaggaagcatctgcgatccttgaatttttaaatactgttactgaggaaacagattttattttgcatacggtgagcaatcaactatctttgtcagaaatggaaacgtttattgaaaataccttaatgacgaaaaattgcatttgtttgattgctaaattaaaaaataaagtgatcggcttgataacaatcattagtcagtctgatattgaaattgaacacgttggggatctttttattgccgttcagaaggattattggggatatggtattggtcatattctcatggaagaagcaatagaatgggcgtcagataacgatattacacgccgcttagaactatcagtccaaggacgtaatgaacgtgctattcacctctaccaaaaattcggttttgaaatagatgggcttcaaacaagaggtattaaaagagaaaatggagaatttctagacatttacagaatgagtaagttgatagattaggaatatacatgaaaatttggaaaaaaataaccttaatgttttctgcaattattttaacaacagtaattgcattgggagtctatgttgcctcagcttataatttttcgactaatgaattgtctaagacttttaaagattttaagctagctaaatcaaaaagtcatgctattgaagaaacaaagccgttttcaatactattaatgggggtggacacaggttcagagcatcgaaaatctaagtggtcaggaaatagcgattctatgatcttagtcactataaatcctaaaactaataaaacaacgatgacaagcttagaacgtgacgtattgattaaattgagtggtcccaaaaataatggacagactggagtagaagcaaagctaaatgcagcctatgcttctggtggtgcggaaatggcattgatgactgttcaagacttattagatattaatgttgattactttatgcaaattaatatgcaaggattagttgatttagtcaatgctgttggtggtataacagtaactaataaatttgactttccaatatcaattgctgccaatgaaccagagtacaaggctgttgttgaaccagggacacataaaataaatggagaacaagcacttgtttattctcgtatgcgctatgatgatccagagggagattatgggcgtcaaaaaagacaacgtgaagtaattcaaaaagtccttaaaaaaatattggcgttaaatagtattagttcatacaaaaaaattctttccgcagtaagtaataacatgcaaactaatattgagatatcatcaaaaacgattcctaatttgttagcttataaagattcattggaacatattaaatcttatcagttgaagggtgaagacgctactttatcagatggtggctcttatcaaattttaactaagaaacatctacttgcagttcaaaatagaattaagaaagaactggataaaaagcgtagtaaaactctgaagacaagcgcgattctatatgaagattactatggtactactgctagtaatgattcttctacttattcatcaacacaagagaataattataatacaacaccttattcagaagcaccaccaagttacagtggtaatactacttatagttctgagactaatcaaacaactcatcaaaattactataatagtagcactcctgctagtaactatagcagtaacactaacacaggtcaggctgattcaagtggaagtgtcaataatcataacggggctgcaacgcctaatccaaacacaggaacgcaaccagtaccaggtcaaactaatccataaaatataaaaaagagcattatttgctctttttatatttagagtagatatttttataccgtcggcttattcgtctttctcttgatatttagccatgcgttgattaatttcttctaaacgaggttgaatatctttattaaacacttggaatttatgattgagttcttgagaaattaatctgattttttctttttcctgactaataatagcaagatcatttttgatacgttctaattttaatttagctgaatctgtctcattttttgtattttgataggaatccttgatagtttttctatttttgtaaagttcaagcgctcctaaactaactaaacctagtgcaattaaacgacctattttcataattgaatctcttttctaatttctttggctaattttgcaagtgcctcaaagtcgggttcatgagtagtgtagtgaattttgataccgtctgattcatcaaagcggggaacaaggtggacgtgtgcatgaaaaacagtttgtccagcaatttcctcattgttgttaataatattcattcctttggcttttgtagcagcttggacagcacgcgccactttaggcaagcgttcaaaggttatctgtgcagttttttcatccatctctaacacatttcgaacatgttttttaggaataagaagggtgtgcccggtcgtagtttgtgtaatgtcgagaaaagctaatacttcatcatcttcataaacttttgatgaagggatttctccactgatgattttacaaaaaatacaattatccataactaattcctttcatgttgaaaaatttattgggtagctattaaggaatggtaaatttttatcgtttgataggtcataagtcgtacagggaaatgaaagtagcccgtattgattgtgatatctatatttaccatcatacttatcttagcatgacctaaagggtattgcaatttttaatgatgtttattattgagtaagtacatttctagaattttggaagtatctaaaataaatttaaatataatgattgacatttttatctaattaaatgtataataaataatataaataaaataaaaatgataattgagatttatcatagaaggaaaactattttgaaattaaataaaataatattatctactgcagctcttactgctctctttttaggatataatagcgttactgcggatacatataataactatcagccacatagatcaaataatatggatttaactgaggaatataactataataaccagatagaacttcaggagcgtataaaaaaactaaatataccttttaaagaaaaacttgccttacttagaaaggttaaatcaagacaagattcttatgtattagacacattaagaaaagaagttgaaaataaaaacagtgagtattcagaactagagcaagaatatcaaagaatttcagctcttattgatgctaagtttccgcaagggaaatctagtttagcagaaaaattacataaagaactaatttgggacttggatggtgttaaatatgatgagggtatttctaagagaactgctctaaaaaaattagaaggtaaaatcaacgaatatactaaaaaatacagttatttattctgataattgagtttgatagttttatagcctaatattctgattactttgcatttattatattgatactaaaaagacacctttttgaggtgtctttttttgtccgatgagtgatggaggtgctttttgtaaacataatgggagcatggggtagcttggcatttcattagatgtaaaagcggacaaaataggtttaaagttattttcaaaactataagggaattctaaagtacaattatccataagaatagaccttccctttcttattttgttataatagttaataaagtatatcaaagatagagagaatgacaatgttaaaaattgaaaatgttacaggggggtatgttaatatcccagttttaaaaaatatttcttttgaagtaaatgatggagagttagttggattaattgggcttaatggtgcaggaaaatcaaccactattaacgagattattggtattttgagaccctatcaaggagatattacaattgatggtattagtcttgaagccgaccaagaactttatagaaagaaaataggctttattcctgagacaccaagtctctatgaggagctaactctcagggaacatttagaaacggtagctatggcgtatgatattgccaccgatgaagttatggcacgtgcgcaaaaactattagagatgtttcgtctaacagataaattagactggtttccaatgcatttttcaaagggaatgaaacaaaaggttatgattatttgtgcttttgttgtatctccaagtttatttattgttgatgaaccatttttaggtttggatccactagctatttcagatttgattaatcttctagcagaagaaaaagctaaagggaaatctattttgatgtcaacacacgtattagattctgccgaaaaaatgtgtgatcgttttgttattttacataaaggagaaatacgggcagttggaaccctagaggaattacgggctatttttggagacagtaatgctaatttaaatgacatctacatagctctgacaaaagaggtgtgatatgaaaaagttatttaataaacgtcgaagtctctttttaactcaaaatagtaaatatttgagatacgtctttaacgatcattttgtattagtattaatgtttttgtcaggttttttgttatatcagtatagccagttactaaaagactttccaaaaacacattggccaattatcgtgattgtgtcaatcattatcttaatgttactagcgatggggggaatagccagctatttagaaccggctgataaacaatttttacttataaaagaagaagcaataaaggaaattataaattctgctaaaaaacggacttatatcttttggttggttattcaaaccttatttttagtattaatatcaccaattttgataaagttaggcttgtcagtttttatgattacattgttaatttttggtctaggaataatcaaatggttggtaataacttacaaggtaaaggtcttttataacaatcaaaatttgaactgggatgcagctataaatcatgagcaggaaagaaaacagagtatattaaaatttttctctttgtttacaaatgttaaaggaatttcgacaagtgtaaaacgtcgttcatttttagatggtattttaaaacttatttctaaaacgccatcgcgtttatggactaacttatttgtgagggcatttctaagaagctcagattatcttggtttaacaataaggttggtaactttaaatatcttatcagtcatctttgttaacgaaacctacctcgcccttgctctggcatttgtatttaactacttattattgttccaactattagctttaggtcaccattttgattatcaatacatgaatcagctctatccagttagattaaatgctaaagcaagtcagctaaaaggttttctcagagtattatcatatgctgtgacagtaattgatagcatacttataagagaattgaaacctgttatattattgatagttttgatgttaattgtgacggaatattacatcccttacaaaataaagaagatgattgactaaagcctataaaacaagtaaaataagaggaaacgactaaatgaaaaggagggactgctggtgacaatatcaaatcaagaattgacgcttactcccttaagaggaaaaagtggcaaagcctatattggtacttatccaaatggtgaacgtgtctttgtcaaatataatacgacacctattttgccagccttagctaaggaacagattgcgccacaactactgtgggcacgccgtacaagtaatggcgatatgatgagtgctcaagaatggttagatggtcgaacattgactaaagaagatatgggtagtaaacagattattcatattttattgcgcctgcacaagtctcgtcccttagtaaatcagctgttacaattagggtataaaattgaaaacccttatgatttgttgatggattgggaaaaacaaactcctattcaaatccgggaaaacacttatttgcaatctattgtgactgagttaaagcgtagtttacctgagtttcgaacagaggttgcaacaatcgttcacggagatatcaaacatagcaactgggttattacaacaagtggtttaatttatttggttgattgggattctgttcgtttaacagatcgcatgtatgacgttgcatatattttaagtcattatattccacaaaaacactggaaagattggctgtcttactacggttataaagataatgagaaagtctggagcaaaattatctggtatgggcaattttcatatttatcacagataatcaaatgttttgataaacgagatatggagcatgtcaatcaagaaatttatgaattacgaaagtttagagagttaattaaaaagcataatgcgagttagaaaacgtaagggtgcagaggaacacttagaaaataatcctcactatgttatttcaaatccagaagaagccaaagggcgttggcatgagatttttggaaataataaccccattcacatagaagttggttccggaaaaggggcttttatcactggtatggcagagcaaaatccagatatcaattatattggaattgatattcaattgtcagtgctttcctatgctttggataaagttctagatagcggtgctaagaatatcaaattactattagttgatggttctagtctatcaaactactttgatactggcgaagttgatttgatgtatcttaactttagtgatccatggcctaagaaaaagcatgagaaacgtcgattgacctataagactttcttggatacctataaagacatacttcctgagcagggggaaattcattttaaaacagataatagaggtttatttgaatatagccttgctagcttttctcaatacggtatgactttaaaacaagtttggttagatttacatgcaagtgattaccagcaaaatatcatgactgagtacgaacgcaaattttcaaataaaggacaggttatctatcgtgtagaagcacgattttagaataagtaaatagtaagtgggtagttatttgctactcctttatggagaggtcgcatagtggctgagtgcgcacgcttggaaagcgtgtagtccctaatgggggctcgggggttcgaatcccctcctctcctttaatcttgttaatgtatcagtgtttattaagtgttcacctttttcactcgtcaaaagtccaagtttcgaaaaatttcttttattttatcatcgtttctctttgagcttgaagtattagcataaagttttctaagctcttacaaagaactgaggacaaaattttaattttttgatataagattagtgtacggtgatgctaatttaaagtaaatgattgcaataatcgtattttgtgctataatagtattaaataatacagaaaggggcggagttttacttcgcctcttatgtgtgtgattcatagaatttatagtcattataagttctaaagcaagttagaaagaagaggtagctgttatcgcaaatcaaactattgttgatattgttactcaagtcgtaactcctgctattcaagcaccgtttgaattagtagatgtagaatacgaaaaaatgggtggcgactatgtgctcagtattttaattgataaacccggaggcattacggttgaagatacagcacaattgacagacgttgtaagtcccttacttgacacaattcaaccagatccatttccagaacagtatatgcttgaagtctcaagtcctgggttggaaagaccacttaaaacagcagaagcattatcaaatgctgttgggtcttatatcaatgtaagtctgtataaatccattgataaagttaaaatatttgaaggtgacttattatcatttgatggtgaaaccttgacaattgattatatggacaaaacacgtcataaaactgtagatattccctatcagacggttgcaaaagcccgtcttgcggttaaactttaagaaaggatgattcttgcgaagcaagaatggacactatgagcaaagaaatgctagaagccttccgtattttggaagaagaaaaacacattaataaagaagatattattgatgcagttactgagtcactaaaatctgcctataagcgtcgttatggtcaatcagaatcatgcgttattgaatttaacgagaagaaagcagactttaccgtctatactgttcgtgaagttgttgatgaagtttttgatagccgtttggaaattagcctaaaagatgcccttgctattagctcagcgtatgaacttggtgataagattcgctttgaggaatctgttacagaatttggacgcgtggcagctcagtcagcaaaacaaactattatggaaaaaatgcgtcgtcaaatgcgtgaagtaaccttcaatgaatacaaacaacacgaaggtgaaattatgactggtactgttgaacgatttgaccaacgttttatttatgtcaatctcggttcacttgaggcgcaattatcgcatcaagatcagattcctggagagagctttaaatctcatgatatgattgatgtttatgtctataaagtggagaataatcctaaaggagtcaacgtttttgttagccgtagtcatccagagtttatcaaacgcattatggagcgagaaattccagaagtatttgatggaactgttgagattatgagcgtctctcgtgaggctggagatcgtactaaagttgctgtacgcagtcataattcaaacgttgatgcgattggaacaattgttggacgcggtggaagtaacattaaaaaagttatcagtaatttccatcctaaacgcgttgatgctaaaacaggattggagatcccggttgaagaaaacattgatgttattcaatgggttgaagatccagcggaattcatttacaatgctattgcaccagccgaagttgatatggtactttttgatgatgaagatacaaaacgtgctactgtagttgttccagatagcaagttatcgctagctattggtcgccgaggacaaaatgtgcgtttagcagctcatttgactggctatcgtattgatattaaatctgcaagtgaatacgaaaaaatggaagcgcaagaacttcaaactgaggaagtagctcaagaatctgaagttatttcagataaggcagaataatataaatgagagaggtgttttatggctaaaacaaaaaaaatacctttaagaaaatcagttgtttctggtgaagtgatcgataagcgagatcttttacgaattgttaaaaataaagaaggacaggtttttatagatcctaccggaaagcaaaatggtcgaggtgcctacataaaattggacaatgatgaagctatcctagcgaaaaagaaacgagtgtttgatcgcagtttttcgatggaagtttctgatgaattctatgatgaactattggcatatgtcgaccataaggtcaaaagaagagagttaggccttgaataattcagaaaaagtattaaatctcattgggttagcacagcgtgcggggcgccttattacaggtgaagaattggttattaaagcaattcaaaatcaacaagtatcgctaatctttctagcaaatgatgctggcccaaatttgacgaaaaaagtaactgataaaagtaattactacaaaacagaagtctccacagtgttttcaacactggaattaagtgatgcgttaggcaaaccaagaaaagtggttgctgtcgcagacgctggattttcaaagaaaatgaggactcttatggcataacagaataggaggacatcaattgtcaaagaaaagattacacgaaatcgctaaggaaattggaaaaacgagtaaggaagtggttgagcaagctcaatcgcttggcttacctgtaaaaagtcatgcttctagcgttgaagaaaatgatgctacacgtattgttgagagttttagctcttctaaaactaaagctccaacaaattctgttcaaactaatcaaggtgtgaaaacagaatctaaaactgttgaaaccaaacaaggcttgtccgatgataaaccttcaactcaacctgtagctaaaccgaaaccacaaagtcgtaactttaaggcggagcgcgaggctcgtgctaaagctgaagcggagaagcgtcaacataatggggatcaccgtaagaataatcgccataatgatacacgctctgacgacagacgccatcaaggtcaaaagcgttcaaatggtaatcgtaatgataaccgacaaggtcagcaaaataaccgtaataaaaatgatgggcgttatgctgatcataaacagaaaccccaaacgcgtcctcagcaacctgcaggcaatcgcattgactttaaagctcgagcagcagctttgaaagctgagcaaaatgctgaatactcacgtcatagtgagcagcgtttccgtgaagagcaagaagccaaacgtcaagcagctaaggagcaagaactagctaaagcagcagcgttaaaagcgcaagaagaagctcaaaaagctaaggaaaaacttgcttctaaacctgttgctaaggtaaaagaaattgtcaataaagtagccgctacgccatcacagacagcagatagtcgtcgtaaaaaacaaactcgttctgataagtctcgtcaattttcaaatgaaaatgaagatggacaaaagcaaacaagaaataagaaaaactggaataatcaaaaccaagtgagaaatcaaagaaatagtaactggaatcataataagaaaaataaaaaaggtaagactaatggagctccaaaaccagtaacagagcgtaaattccatgaattaccaaaagaatttgaatatactgagggcatgaccgttgcggaaattgcaaaacgtattaaacgcgaaccagcggaaattgttaaaaaactctttatgatgggagttatggcaacgcagaatcaatcattagatggagacactattgagctattgatggttgactacgggattgaagcacatgctaaggttgaagttgatgaagctgatattgaacgcttctttgcagatgaggattaccttaatcctgataacttaacggaacgtccgcctgttgttactatcatgggacacgttgatcatggtaaaacaactcttcttgatactctacgtaattcacgtgtcgctactggcgaagctggtggaattactcaacatattggtgcttatcagattgaagaagctggcaagaaaattactttcttggatacaccagggcatgcggcctttacttctatgcgtgcgcgtggtgcatcagtaactgatattactatccttatcgttgccgctgatgatggtgttatgccgcagacagttgaggcaattaatcactctaaagctgcgggtgtcccaattattgttgctatcaacaaaattgataaacctggtgcaaatccagaacgcgttatcagtgaattagctgagcatggtgtcatctctactgcatggggtggtgagtctgaatttgttgaaatttcagctaagtttggtaaaaatattcaagaattacttgagacagttcttttagttgctgaaatggaagaattaaaagcagatgcagatgttcgtgctattggtactgttattgaagcccgtcttgataaaggtaagggagccgttgcaacgcttcttgtccaacaaggtactttaaatgtacaagatccaatcgttgttggtaatacatttggacgtgttcgtgcgatgactaatgatcttgggcgtcgtgtcaaagttgcgggtccatctacaccagtttctattactggtttgaacgaagctccaatggctggtgatcattttgctgtttatgcagatgagaaagctgcgcgtgctgcaggtgaagaacgtgcaaaacgtgctctcttaaaacaacgccaaaacacgcaacgtgttagcctcgagaacttatttgatacccttaaagctggtgaagttaagtcagttaatgttattatcaaagctgatgtgcaaggttctgtagaagcacttgcagcttctctccttaagattgatgttgaaggagtaaaagttaacgttgttcactcagcagttggtgctattaatgagtctgatgtaacacttgctgaagcatcaaatgctgttattataggatttaacgtacgccctactccacaagctcgtcaacaagcagatgctgatgatgtcgaaattcgtcaacatagcattatctataaagttatcgaagaagttgaagaagcgatgaaaggtaaacttgatcctgaataccaagaaaaaatccttggtgaagccattattcgtgagacctttaaagtttcaaaagtgggaactattggtggatttatggttatcaatggtaaagttactcgtgattcaagtgttcgtgttatccgtgatggtgttgtcatttttgatggtaaattagcaagtcttaaacactataaagatgatgttaaagaagtcggcaatgctcaagaaggtggtctaatgattgagaattataacgatctcaaagaagatgacactattgaagcatacattatggaagaaattaaacgtaaataacccctatgagaaactcaacttgtatctttagttggtagggaaatacaaaattatggctaggctcgtcctagctttcaagttatgagcacaatgaagaaaggattaattatggctaatcatcgtattgatcgcgttggaatggaaattaaacgtgaagtcaatgagattttgcgtctccgagttaatgatccacgtgtacaagatgtcacaattactgatgttcagatgttgggtgacctttcaatggctaaagtattttatactattcattcgacacttgcttctgataatcaaaaagcacaaattggtttagaaaaagcaactggtactattaagcgtgaacttggcaaaaaccttactatgtataaaataccagatttacaatttgttaaagatgaatctattgaatacggaaataagattgatgaaatgttgcgcaatctagataaaaaagattagaatcaagattaagaataataaaaaataaaccatgtcaaaatcatggtttattttttatagctttagagttgagatagctagtattaaggagttttattgatgatatcaatcatttgatactgtgctgttttagcttcttcaatagggtaaattggataaacatgattcattccctcttgtgcaatatagttaacggggtgattagctgcttggagttgtgcagcataatcgcgaatatctgggaagaatatttctcgtgttccagtaaataacgtaataggagcgagtttagtagcaggggcatttttaggactaacatatgtatggttagtattattagaaccatttgcccaaatttcacctacacgtgcgagaccccaagcagataggataggatcagtatcttcgtatttgggaatttctggatgtttcattgtcacatctagccatggagataagaggataatatttttaggttgaggaatagcctcttgccctgattggtgagacaatgcatgcgctaatcctagtgctaatcctccgccagctgaatcacccatcaaagtgagattagcgtttttttcatgaaagtgtctataaaggttaaccaatctagggatagcataatcataggtataacgaggagtttttggataaattggtaaaataatttttgcatcaagactagttgagagcgtcttaagcatgctgatatggtaaggcgttggattatttaagtaagagccaccagctaaatagaaaatggtcttttgattagctttaccgttgtcattccaagaatagacttgcatatcaaaaagtctctcttgaacaagccctccattaacagagtttgggtctaagtaataacccttatcagattgttcacggctagcatttaagtacttttgaaatgagctttcatcttgaactttataataacttttatcgcgctttagccaaaagtattgttcgataaaccaacttttccatgaacgcccacttgcttttgcatgtggtgtacaggcgatggataaaatggtgataatactaaatagtagcaatagttttttgaaggacggtttcaaggtattctccttaatataatgttattttttgtgtaatattattataataaaaccaacatctttgtcaatagaataaagaaagatgagaaatgtttttcggtttacaaatgtagatttatttgctaaaattggtttacaaacgtaaatcgaaagaggtgagaaaatgactatttcaagcgcagaatgggaaattatgagagtggtttgggcacagcagaatacaaccagtaatgagatactagcagttttactagagaagtatgattggactccttcaactgtcaaaaccttattaagaaggctcttagataaaggctacgtgagcagagaaaaaatgggaaaaggatttagctattctcctttaattgatgaagatttagctatgatgtcagaggtagatagtgtatttcaaaaagtttgccagaccaaacatgttgctattgttagacacttattggaaagtataccaatgacagagaaggatcgattaaatttgcaatcatcactagaagctaagaaaggcaaaacacttgaacgtgtagcttgtaattgcattcctggtcagtgtcaatgccattagaaaggagaaaatatggctaatagaaaagaaacatttttgattgatgggatgacttgtgcatcttgtgctttaacgatagaaaaagctgtcaacaagttagaccatgtggatagtgcagtagtaaatttagcaacagagaaaatgacagttacgtttgatgatacaaccttatcgccaaatgtgattgaagagtgtgtttctgagagtggatacgaagcatcgcttttcaaagaggaaacttctaaaagccaatctgaacggcaccaattagccattgaaaagatgtggcatcgcttttggatgtcagcagttgcaactatacctcttctctatatttccatgggaccaatgattaacttatggttaccatcatttttgatgccagataagggacctctaaactatggtatgatacaattattgttaacactaccggtgatgtattttgggcgtatcttttaccaaaatggttttaaagcactttttaaaaggcatcccaatatggattcattagttgctatagccacaacagcggctttcatttatagcttatatggattgtacgaaatattacagggtgacatacactacgctcaccagctttatttcgaatctgttgcagttattttaacacttattactctaggaaaatattttgaaatattatccaaagggcgtacttcggcctcgattgaaaaattattaactttatcagcaaaagaagcaagagttatcaaagatggtgaagactatatggttcctttggataaagttaaaataggtgaaacaattcttgtcaaacctggagaaaaaattcctcttgatggccatgttgtagcaggagaatcaagtattgatgaatccatgttaacaggtgaaagtattccagttgaaaaaaaggttggtagtaaggtttacggtgccagcattaatgggcaaggtagcttaacgattttcgttgaaaaagaagctggcggttcccttctatcacaaattattaacttagtagaagctgcacagacaagtaaggctccaattgctaacttagcagacaaagtatcaggagtctttgtcccttttgttattgtcattgcaattttatcaggcttgagttggtacttaattctggggcaaagttttgccttctctctgaagattatgattgcagtcttagtgattgcttgtccatgtgctttagggttggcaactcctacagctattatggtggctagtggtaaagcagctgagaatggtattttatttaaaggtggtgaagtgttggaaaaggctcaccacattgatacaatagtttttgataaaacaggaaccttgaccaaagggaaaccagaagtagttgctatcaaaacatatgggggagataaagaggagtttttaggtcaggtagcatcagtagaaaaactttcaaatcatccacttagccaaacaattgttaataaagcaaaagagaaagaacttcccttaagggaagtcatggcttttaaaaatattttgggttacggtttgagtgcaactattaatggtaaaactatgcttgtaggtaatgctaacttaatgactaagaacgatgttaatttagatttagcaaaggctgatatagaaatagctcaagaagaagcacaaactgtggtttacgtttccgaaaatggagtgttgagcggtttaataactttaacggaccagctaaagacagatagccaagaaacagttaagcagttacaaagattaggatttaatttagttttacttactggtgataataaggctagtgcagatgccatagcacaaaaattgggtatcacgacagttgtttcagaagttttacctgatcagaaagcaaacgttattttagaacttaaagaaaaaggcggacagattgcgatggttggtgatggcatcaatgatgctcctgcgctagctagcagtgatgtaggtatctctatgagttctggaacagatattgctattgaatcagcagatatcgtgttgatgaaacctgagttaacagatctcttaaaagcaatgactatcagtaaacaaacgattcaaattattaaggaaaatttattttgggctttcttttataacgttttagcgattccagtggcaatgggtgttttacatctttttggtggtcccttactcaatcctatgttggcaggcttagctatggcgtttagttcagtttcagtagttttaaacgcacttcgcttaaaagtcttaaaataataaagataataagactgaatttttatgaagggagaagaatatgaaacatacctatcgagttagtggcatgaaatgtgatggttgtgccaaaacagtttctgataagttatcaagtgtgattggtgttgacgaggttaatgttgatttgactaaaaatcaagttgtcgtaagtggaaaaacattcaaatggcttttaaaacgttctttaaaagacacaaagtattcactagaagaggaaataaattaataactaaagaagtggttacagcttttaatttcttaatttgagcagtttctcacttcttttttattctaaaaatgataaactagaatagaattagttgtgaggagtgcagatgtcaattgatatttggaacattttaagtttggttggaaccgtagcttttgcaagttcgggagctattgtggcgattgaggaagaatttgatattctagggctttttatcttaggttttgtaacggcatttggtggtggagctattagaaatgtactaattggcttgcctattgaaacactttggagtcaaggaattgctttttatgcagcagcagcagctattttatttattatgattttccctaatttgttgagtggtaagggacgggatgccgaagttgtatcagatgctattgggttagcagcgtttagtgttcaaggagcactatatgcgactcaatctcatcaacctcttagtgctgtcattgtcgcagcagtactaactggtgcaggtggtggtattgtcagagatgttctggctggccgaaaacctggagtactaagaagtgaaatatatgcaggttggtcaatattagtggggatcattttatattttaaaattgctaaaacaacaactgactattatttgttagtgttagttgtaactagcctaaggatgttgggttataagaaacaatggcacttgccagttgtcagaccacgtaagaaatgatagaggagaaaaagatgataaaattaattgctattgatatggatggaacgcttttaaatgatgaaaagaaaattccaaaggaaaatatccaagctattaaagaagcaactcaagcaggtattaaaattgtactgtgtactgggcgaccgatgtcaggtatacttccttattttaatgaactaggtttaacaaaagaggagtatattatcatgaataatggttgtagcacttatagcacgaaagattggcaattgattgattctgcaactttaacacatgatgaactcatctttcttgaggaggttgttaaagaatttcccaacgtttgtttaacattaacagctgaaaatacattttacgctgttggagaggaagttcctgaaattgttgcttatgatgctgatttagtttttacaaaagcaaagtcaacaagtttagatgctcttcgcaatcaagaagaaattgtctttcaagcaatgtacatgggattagatgcagatgtaactgcttttcaagaagctgttgaagaagccttaatctcgaaatttagtggagttcgaagccaagactatatttatgagattatgcctcaaggagtaacaaaagcaagaggcttaaaatccttgatagcaaaattaggactggatattaatcaagttatggccatcggtgatgctcctaacgatattgaattattagatttagttcccaatagcgttgctatggggaatgcatcagatgagattaaatctagatgtaaatatataacggtggataataacaaagcaggggttgctaaagctatttatgactatgctttacgttaaaatagatatagaataataaagggaactttaaacactgtttgtttagggttcttttgtttaataaactaacaaaattcagaagtttacagatagcttatgctataatagacctatgacaaacaagaataaattacttttaattgatggctcatctgtagcctttcgtgctttttttgctctttataatcaaattgaccgctttaaaaacaattctggacttcatactaatgccatatatggtttccatttgatgttgaatcatattttaggtcgtgtccagcctagtcatattttagtggcttttgatgccggaaaaactactttccgtacggaaatgtatgcagattataaaggtgggcgtgctaaaactccggatgaatttcgtgaacaatttccttacattcgtcaacaattagatgtcttaggcatcaaacattatgaattggaacattatgaagccgatgatatcattggtactcttgcaaaacaagccgaagctagtaatgaacattttgatataacggtggtttctggggataaagatttaattcaattaacagacactaacacggtagtagaaatctctaaaaagggagttgctgagtttgaagaattcacgccagcttaccttatggaaaaaatgggaattacgccgagtcaatttattgatttaaaagctttgatgggagataaatcagataatattcctggggttactaaaatcggtgaaaaaactggcttgaagttgctatcagaatatggttccttagaagggatctatgaaaatattgaggctatgaaacagtctaagatgaaagaaaaccttatcaatgataaggagcaagctttcttatcaaagaccctagctacaatcaacatagcatcacctataacaatcggcttagaagatatcctttatagtggaccgcaagatataaaagccttgtctcaattttatgatgagatggattttaaacagtttaaagcagctctgggtgaggagacaagtcaggaagattttgaggttgactttactgaagtggagcaattaaaaacagaaatgttctccgataatgatttttattactttgagatgttgggtgataactaccatgtagaagatttaattgggatagcttggggaaatagcgatacaatctacgctactagtaatgtatcgttattgcaagaagctttatttaaaaaagctttatcaaaacctatcaaaacttatgattttaaaagaagtaaggtccttttaaatcgttttaatattgatttaccagagccagcctttgatactagattggccaagtaccttttgtctactactgaggataatctagtatcaacaattgctaggttatatacaaatctgccactggatactgatgatgctgtttatgggaaaggtgctaaacgcgctataccagaaaaaacacgatttcttgagcatctagctaaaaaagtaaaagttttagtggattctgaggctaatattatgcaacagcttaaagctaatgagcaagaagaattgctgtttgaaatggagcaacctttagcgaatgttttagctaaaatggaaattcgaggtattaaggttaagaaaaataccttgaatgaaatggccattgaaaatcaaaaagtcatcgaaacattaacacaagaaatctatgaattggctgggcaagagtttaatattaattctccaaaacagttaggaaagttgttgtttgaaacgttaggtcttcctgtagaaatgactaaaaaaacaaaaacaggttattcaactgcagtagatgtattagagcgcttagctccgatttctcctcttgtaactaaaattttagagtaccgtcaaatcactaaattgcaatcaacctatattattggtttacaagattatattttagaagatggtaaaattcatacacgttatgttcaagatttgactcagacaggtcgtctttcaagttctgacccaaaccttcaaaatataccagttagactagagcaaggacggcttatccgaaaagcttttgttccatcagaagacaatgctgttttattgagttcagattattctcaaatagaattgcgcgtgttagcacatatttcaaaagacgaacatttgatcgctgcctttaaagagggagctgatattcatacttcaacagctatgcgtgtttttggtatcgaaaaacctgagaatgtcactcccaatgatcgtcgaaatgctaaggctgttaattttggaattgtttatggtatttcagattttggtctatcgcataatttaggaatacctcgtaaactagcgaagcaatatattgacacctattttgagcgttatcctggaataaaaaactatatggaaacagttgttcgtgaagcaaaagataagggttacgttgaaacacttttccatcgtcgtcgttcattaccagatattaattctcgtaattttaacattcgccaatttgcagagcgcacagcaatcaattcaccaatccaaggaagtgcagctgatattcttaaaattgcaatgataaatttagatagggtacttgataaaggtggttataaatcaaaaatgctgttgcaagttcatgatgaaattgtacttgaagtccctaacgaggagataggagcaatcagggagttggttacaaaaacaatggagtcagcaattagtttatcggtacctttgattgcagatgagaacgcaggtgagacttggtatgaagcgaagtagtggacaacatacgtaaaggagtcattaatatggtttatcattttcaaaatccaagtgattttatgttaaaaaattatttaacaaaagcaaagaccatcgcagttgtaggactgtcagaccgtcaagaaactgcagcttatcaagtatcaaaaataatgcaagaagcaggttatcaaattattccagttaatcctaaaaatgcaggacagaaaatacttgggcaaatgacatatgcctcacttaaggatgtcactgaacatattgatattgttaatatttttcgacgtagcgagtatttacctgatattgcaagagaatttttagaagtagacgctgatattttctgggctcagcttggacttgaaagtcaagaagcagagacaattctaaagcaagcaggacacaaacagattgtcatgaataaatgtctgaaagttgaatgccaaaaattacactcagaaactaactaattaccgtgtttaataggcaaataatataaattatgctataataaccatgctaaattaaagttcgtgctggaaaggagtcctatggacagtcattcacatggtcatagacctctcgatgcttatgaaaacgtcctagagcatctccgtgaaaaacgtattcgaattactgagactcgaaaagctattatttcctatatggttaatagtcgtgagcatccgagtgcagaaaagatttacaatgatttattaccagaatatcctaacatgagcttggcaacagtttacaataaccttaaggtccttgtggatgaggggtttgtgacagagctaaaactttgcaattatagtacaacttattatgattttatggggcatcagcacctaaacattgcctgtgaagattgtgggaaaatcgttgattttgtcgatgttgacttattggatatttctagagaagcacaccaacaaacaggttttgaagtgactagagttcagttagtagcttatggtatctgtccggagtgtcagaggaagcgtaaggataaatataaaaaagattgaaacgtaattgttcaatctttttttgtttatagactaagagaaaaagtttaagttttactaagtaataattaagaaataatttataattgcttaaaaaatgatttattttttgttggtatactctcattaacaaaaagaaagaggaatcccttatgaaaatatcacaatacaataaatggtcaattcgccgattgaaagttggagctgcatctgtaatgattgctagtggaagcattgttgctttagggcaatctcatattgtttcagcagatgagatgtcccaacctaaaacaaccattacagctccaacagctaacacttctacaaatgtagaaagtagtactgataaggcattatcaaaagttactacgatggagacaagttcagaaatgcctaaaatgcaaaatatggcaaaagttgaaaaaacgagtgacaaacctatgatggtggctacctctgttagaaaaatgatggcaacgccgacacctgtagcgatgaccaaaacgactagtgtagatgaggtaaagaaatcaactgatactgcttttaaacagacagtagacgttccggctcattatgttaatgcagcaaaagggaatggcccatttctagcaggtgtaaatcaaacgattccatatgaagcgtttggtggagatggcatgttaacgcgtttaatccttaaatcttctgaaggagcaaaatggtcagataatggtgttgataaaaatagtccattattaccattgaaaggcttaactaaaggtaaatatttctatcaagtttctttaaatggtaatacgacaggtaaagagggacaagctctcttagatcaaattaaagctaatgataaacatagctaccaagccacaattagagtttatggtgctaaagatggtaaagttgatttaaaaaacatgattagcccaaaaatggtaaccattaacattcctcacattacaactgatatggaagtaaaaaattctctaaagatggcctttaaagaaaaagtagacgtcccagcaaaatatgttagtgctgcaaaagctaaaggtccatttttagcaggtgttaacgaaacgattccatatgaagcgtttggtggggatggcatgttaacgcgtttaatccttaaagcttcagagggagcaaaatggtcagacaatggtgttgataaaaatagtccattattaccgttaaaagatttaactaagggtaaatacttctaccaagtctctcttaatggcaatacagccggtaaaaaaggccaagctctcttagatcaaattaaggcaaatggaagccatacttatcaagcaactatcactatttatggtacgaaagatggcaaagttgatatgaatactattttaggacaaaagacagtgatgattcatattaatgtcgctaaaaaagatatgaatagcacatcaatgatgatgaaaaaagataagatgacaatgcctatgaagaaagaaatgacttcatctaaaataaataccggtatgatgatgtctaacaacaagatgtcagctaatatgcaaatgtcatcacaagccaaatcaaatgataaagctggtaaaaaaatgtctatgatgtctaaaaatttacctaatacaggtgaaacaaagcaacaaaatgtaggtgtgctaggtatgcttagtctagcctttgcgacaggtctaactgcgctaggtcttaaaaaatctaaacaaagatagggatagtatttaattcagaacaccaaatttgtttaaaattattgagggttatcgtggtaaaatagtgttatactagaggtatagcactattttgactcattaggagagtagaatgacacaaaaattattattagttgacgatgaatttgaaattattgatattaatagacgttatctagagcaagcaggatatgaagtgtcagtagctgcggatggcatagaagcactcaaagaggtagatgagaatcgttttgacctaattattagtgatattatgatgcctaaaatggatggctatgattttattagtgaagttctagttcgagaacccaaccaaccttttctctttataaccgctaaagtatctgaaccagataaaatttactctttgagtatgggtgcagatgactttatttccaagcctttcagtcctagggaattagttttacgtgttaaaaatattctaagacgtatctatgggaatcatcaacaatctgaagtgttgacgattggtgatttggttatcgaccaaaaacaacgtttggtaatggtggactgcaatacaatttccttaaccaataaatcatttgacttgctttggatattagcaaatcatttgaatcgtgttttttcaaaaacagagctttatgaacgtgtctggggcgaagaatttttagatgacactaatactttgaatgttcatatccatgccttacgcaatgaccttgctaaatttagtacagacaataccccaactatcaaaacagtttggggattagggtataaattagaggaataaaatgaaattaaaatattatattgttattggttaccttatttctatgttaataactgtagcaggtgttttctttgggcttaatcatatgctgattgagactcgaggtgtttactacatcctttcagttacaattattgcctgtattgtaggtggtatagttaatttgttcttattatcaagtgtatttacatctttgaaaaagttaaaacaaaaaatgaaggatatttctcaaagatgttttgatacaaaagcacaaatttgttcaccacaagaattcaaggatttagagacagcctttaaccaaatgtcttcggagttagagtcaacgtttaaatctctaaacgagagtgaacgcgaaaaaacaatgatgattgcacaactttcacatgatatcaagactccaattacttctatacaatcaacagtagaaggtattttagatggtattatatctgaagaagaagttaactattatctcaataccatttctcgtcaaacaaaccgtcttaaccatctggttgaagaattaagttttattacattagagactatgtcagacacggctgaacctcataaagaagaaacaatttatctggataaactactgattgatattttatctgaatttcaattggtgtttgaaaaagaaaatcgccaagtaatgattgatgttgcgccagatgtttcgaaattatctagtcaatatgataaattatcacgaattttattgaatttgattagcaatgcagtcaaatattctgatcctggaagtcccttgactatcaaggcctattcaaatcgtcaagatatcgttatcgatattattgaccaaggctatgggataaaagatgaagatcttgcttctatttttaatcgtctttatcgtgtagaatcttcacgaaatatgaagacaggaggacatggtctaggtctttatattgcgcgacaacttgcacatcaactgaatggggatattttggtcgaaagtcagtatcaaaaaggcagtaagttctctttagtacttaaattacaaaaatagctaggaattattcctagctattttttgtaatgtttctataaaagattaagcgcgcagtagtttggtaaggaaggagatagatatagactaatccgaaactgaagattgtaaggaactgccaaccaataaaacttaagtctaaaaggaagagtctaagtttattaccattcattagttctcgactagcaaccagtactttagacggtccctcatagtttccactttctaattgagtgtaaaatactaaagttgagatactataggagtaatattgttgaacgagttttataactgccttagtagtaattaggctactaacaactattaaaacaggggcaaggataaggttaccactcaaaagtagcctaaaacttgaaatgatgattagtagaccaaaagtacttagtagataaaagaaagataaaattagtccttttagaacaagtactgagagtaatttccagaaaatatggcttgaaaatacataagtattgtccgagaatctaacgtttagtttctgatttttgacgacatctaacattacaaaactgactgaaataataaaaagtgtgtaaaagaaataaactggaagaggtacaaaaaaatcaagtagtgtcatattattatattgataataaaatgatatatataacgtaataatactaaggagaatcgggagtaaaaaaagttgattcttaccttgaagattgcttaatatagtttttgcctcatttttaatttctgaattcgtcatatctcctccatacacaaaagtacaattcatttcattataacacattccttaagatgagcatgacaagagtacatttttttgataaaatcttaatggctaaaaaagaaattaatacaaagtattacatttagatattgattagcactaaagcccatgactgtttttcatggaagcaaggagaaaacgatgactgatcatccaataaaatatcgattaattaaacaggaaaaacacacaggagccagacttggtgaaataatcacaccacatggtacatttccgacaccaatgtttatgcctgttgggacacaagcaactgttaagacacaatctcctgaagaactaaaagaaatgggttcaggaattattctatcaaatacctaccatttatggttacgtccaggtgatgaattgattgctaaagctggaggtttacataaattcatgaactgggatcaggctattctaacagacagtggaggctttcaggtttattctttggctgatagtcgaaacatcactgaagaaggagtaacctttaaaaaccatttaaatggtgcgaaaatgtttttatcaccagaaaaagctatttcaattcaaaataaccttggttctgatattatgatgagttttgatgagtgtccacaattttaccagccttatgattatgtaaaaaaatcaattgagcgaacaagccgttgggcagaacgtggattaaatgcccaccgccgtcctcatgatcaaggactatttggtattgttcaaggggcagggtttgaggatttacgtcgtcaatcagcacgagatttagtatcgatggattttccaggttattcaattggagggcttgcggtcggagaaacacatgatgagatgaatgcagttcttgattttactgttccaatgcttccgaatgataagcctcgttatttgatgggagttggtgcaccagatagtttaatagacgccgttatccgaggagtagatatgtttgattgcgtcttacctactcgtattgctcgaaatgggacatgtatgacaagtcaaggtcgcttagttgttaagaatgctaaatttgcagaagattttacgcctcttgatccaaattgcgattgctatacttgtaaaaattatacacgcgcttatattcgtcacttattgaaagcagatgaaacttttggtattcgtttgactagttaccataatctttatttccttgtcaatcttatgaaagatgtcagacaagctattatggatgataatcttctagaattccgtcaagattttatggagcgctatggctatggcatgaataaccgtaatttttaaaaaagttcctggtaaaacagggcttttttttgaattgtttgttaaccgtttttttaaaaaagttgacaatagaaaaacttttgtataatatgttataggaggaatcatgatgcaagagtactttggtattggtcttgatagtagcagccgctgttaccactatcatactaaattggatattgtcgctttaaaatgtgctgtttgtcaaaaatattatgcttgttataaatgtcatgatgcactcgaggagcattgttttgcagcaacaaaatctgatgaaacgtttcctgtcttatgcggttcttgtcgtcagatgttgacattaaaagagtataaaactggtttttgtccttattgtcgtatgctttttaatccaaattgtcaacgccatgattctatttatttttcgaaggagtaatttttaatgtttcacacaaaaagcctaatccagatggctatgatggctactttattggtggtacttggtttcattcctgctctaccacttggtttcattccggtccctatcgtcttacaaaacctaggggttatgatggctggtgttattttgggcggaagaaaagggagtttatctattttgctcttctttcttgtcggtttagttattcctgtattctcaggtttacgttcgactatacctgtattgacaggaccaacagctggttatgttattgcttggttgtttgttcctttgcttatctcatatggtgtaaaattagtaaataaaaagaattttatagctattttccttattgtatggctagcaggggtcctttttgtagatgtagcaggagcagtttggctggcatcttatacgaacatcccattagataaatcacttcttcaaaacttagtatttatcccaggagatacaataaaagccattatagctgctgttgttgctgttaaatataaagatagttttttcttgactgaaaaataatcaagattgctatatattagatggactagtaaatctaaaaatttagatttactagtcttttttgtgcataaaatctaaaacagttattcttaataaaatttggtataatagcattaaatcagtaaggaggggattatcatgaaattaacaacgttaggttgttggggtggttatccttataaagatggaggaaccacaagttttctattaactggagaaaataattttcacttattaatagatgcgggaagtcgttcaatcaatgagctagaaaaagaaataagcccgttggatttggatgcagttatcatcagtcattatcatccagatcatgtagcagatttgggtgtgttgtatcattatcgtttgctataccctaaagataaatgggaacccaaagtattgccagtttatggacataatgaggatgattatgagttttctaaattgacattacctaacgttgctcaaggaattgcttatcataccaatggagttgagcaagttggtcccttcaatattacgtttatcaaaacagtccacccagtcgtctgctatgccatgaggattacagaaagagaaactggtcaagtattagtctttacaggagattctgggtattttgctgaccttgtaccttttacaaaaggcgcagatttatttttagcagacgtttatctttacgagggaaatgaaaatcatattgcacatttgactagtaaagaagcaggtgagattgcttataacgctaaagttaagaaattagttttaacacatgttccgcagtttccgggagaaggaataaaccccgaaaatcatttggaagaacttcgactacagtctgaaaagtatgcaggtggcatctctgttgatttagctcagccacataaatcttgggacttaggaaaactataatgcagaaatttacccaagaagaaaaagaatggtttatgacagaagctctaaaggaggcaaaatcctccttagagaaagaagaaattcctataggttgtgtcattgtaaaagatggtcatattattggaagaggacataatgctcgtgaagagtttaataaagctattttacatgctgaaatcatggctattaacaatgcaaatgagaaggtagggaattggcgcttattagatactactttatttgttactgtagaaccttgtgtaatgtgtagtggagctattggcttagctagaattccccacgttatatatggcgctaagaatacgaaatttggagcagcgggaagtctctatgatattttaagtgatagccgacttaatcatagagttgaggttgaaaccggcattttagaagatcaatgcgctaaaataatgcaggatttctttcgaaaaggacgacaacgcaagaaagaagctaaactaagtgaaaaaactaagatttgatagcttgcaataaaatattagttttgttataatatctttggagcaacatttactcgtgaagtgggtcaggggaggaatccagcagccctaagcgatgctaaatgtgtgctctttttattttcaaaagtcaaagtgtttttggaaataattatgaaagtttcataaaaattggtagcgtttcaaaaaatatgaaaatacagttaaaaaaccttgaaaaaaaactcacaaaagagtaagatgatagtgaaacataattgttaggagaaataaaatgacacatattacatttgactattcaaaagtcttgggtcaatttgtaggcgaacacgagttagactacctacaaccacaagtaagtgcagcagatgctttccttcgtcaagggactggtcctggctcagattttctcggatggatggacctcccagaaaactatgacaaagaagaattttctcgcattcaaaaagccgctgaaaagattaaatcagatagcgaagtactcgtggttattggtattggtggttcgtaccttggcgcaaaagcagcaattgactttttgaataatcattttgctaatttgcaaaccgcagaagaacgtaaagcgcctcagattctttatgctggaaattctatttcatctacttaccttgccgatttagttgaatacgtccaagataaagaattctcagtaaatgtcatttcaaaatcaggtacaacaactgaaccagcgattgctttccgtgtatttaaagaacttctagttaaaaagtacggtcaagaagaagctaataaacgtatctacgctacaactgataaagttaaaggtgccgtaaaagttgaagcagatgctaacaattgggaaacatttgtagttcctgataatgttggtggtcgtttctcagtactgacagccgtaggtcttcttccaattgctgcttcaggagcagatattactgctcttatggaaggcgcaaatgctgctcgtaaagatttatcttcagataaaatctctgaaaacattgcttatcagtacgctgcagttcgtaatgttctttatcgcaaaggttatatcacagagattttagctaactacgaaccatcattacaatactttggtgaatggtggaaacaattagcaggtgaatcagaaggtaaagatcaaaaaggtatctatcctacatcagcaaacttctcaactgatcttcactcacttggtcaatttattcaagaaggttaccgtaacctctttgagacagttgttcgcgttgagaaacctcgtaaaaatgtgactattcctgaattaaccgaagatttagatggtcttggttatcttcaaggaaaagatgtagattttgttaataaaaaagcaacagatggtgtactccttgctcatacagatggtggggttccaaatatgtttgtaacgcttcctacacaagacgcttacacccttggttacactatttacttctttgagttagcaattggcctttcaggttatcttaactcagtaaatccatttgatcaaccaggggtagaagcatataaacgtaatatgtttgctcttctaggtaaacctggattcgaagagcttagcgctgaattgaatgcacgtctttaaaaatatctaactaaaaagttcctcaaagagaggaactttttagttttgttgtaggataactaaaaacccactagcaccggtagcgatagtgggttggaaaaagggttgagaaaagttattaacttttctcaggagatttatgaaaaaggaaaataatttaggataatattttcctaacggctaggataaaccgcttattttaggatgatactagtatacagtagaaaccttaaataaaccttaaaaattcatactttatcattttattttcccctatactatttttgtataaatggtcaatattaatggtatcatagatatatggaaaagaaattattaagaaaagaagttttgataaccttaaaatctcaacctcaagcttacaaatcagaagttgactgtaaacttttagaggcttttataaaaactaaagcttatcaaaatagttgtgtaattgctacttacctatcttttgactacgaatacaatacacaacttcttattaaacaagctttatgtgatggcaaacgtgtccttgttcccaaaacttatccaaaaggtaaaatgatttttgtggactatcaaaaagataacttgaggacaacaccgtttggcttattagaacctgttaatgatagagctgttgaaaaagctagtatagacttaattcatgtgcccggacttatctttaacaataaaggttttcgtataggttatggtgcaggttattttgatcgctatttgagtgattttgaaggtgatactattagtactatttataggtgtcagagacaggattttgtagaagagaagcatgacgtagcagttaaggaggtattatgtctatgaagaagttcgctaaagagtatccgacgacagtactcttggtcagtctgacaacccttgtttttttattgatgcaactaacttatggaagtcaagcggagtctagccaagttatttttcaatttggtggaatacaaggtgattatctaaaagcatatccaacaaatctatggagactaataagtcctatctttgttcatattggttgggaacattttttattaaatggtttagctctgtatttcgtaggacaaatgggggaaagtatttggggaagtttgagatttctaattctctatattttatctggcttaatgggtaatatttttacgctattttttactccacatgtggtggcagcaggagcctcaacgtctttatttggtgttttttctgctatagcaatcgcagggtattttggaaaaaatccttatttaaaacaagttggaaaatcatatcaagtgatgatcttgttaaatttattttttaatatcttcacacccggagtgagtttagcaggtcatgttggtggtttagttggtggagtattggtggctatttttttgacaaaacaaaatggttctttattatttaaaacttggcaaagtattttagctttaatgatatttattattgtatcgatcagcttaataggtctatcgttggtataattctacggctatagcctctaaaaccaaactttctctgggaaaaatagaataaagtttgctaaatgatttttttatgttatgatagaaatctgtttttatgtgactataacttattaggaggttcattctcggtgaacagaaaaattattggcttaactctactatctttatctgtactaacattaacagcatgtggtaatcgttcagataagtctgcaaataaatcagatatcaaagttgcgatggtaactaatcaaggtggagtagacgataaatcgtttaatcaatcagcttgggaagggctacaaaagtggggaaaaaagaaggggttgacaaaaggtaatggctttgattatttccagtcatctaatgaatcagatcatgctaataaccttgatacggcagcctctagtggttataatttaatttttggtattggatttggtcttcatgatactattgaaaaagtatcagaaaataataaagatgttaaatacgttattgtagatgatatcattaaaggtaaagaaaatgtagctagtgttacttttgcagacaatgaagctgcttacttagctggagttgctgcagctaagacaactaagacaaaaacagttggttttatcggagggatggaaggcgtcgttgttaagcgatttgaagcaggatttaaggctggagtaaaatcaattgatccggctattaaagttgcggtatcttatgcaggctcatttacagatgcagctaaaggtaaaacgattgctgccacacagtatgcaacaggtgttgatgttatttaccaggctgctggtggtacaggagcaggaatttttagtgaggctaaaactgaaaatgagacccgcaaggaatctaacaaagtctgggtaattggtgttgacagagatcaaagtcaagaaggcaattatgtttcaaaagatggtaagaaagcaaactttgttctggcatctactataaaagaggtggggaaatctctccaatctgtagcagaattaacagagaaaaaacaatatccaggagggaaagtaacagtttttggtctaaaggatagtggtgtagatattaaagagcatcaattgtctagtgagggatctgttgctgtcaaaaaagctaaagaggatattgtttcagggaaaatacaagttcctatgaaatgataaaagtgtggaggaacaataagttcttcgtcaagtacaataaaaaagtttcctatttaggaaacttttttattgtacttgactcatattttacttcttagatgttttttctagagattttcctaaatcaatgatatatttcttcaagtcatctttaacttgtgggtgttgaagagcataatcaatagatgttttcataaaaccaaacttgtcaccaacgtcgtaacggtctcctgtaaattttctagcaaaaacacgttgcgttttatttaaagtatcgatagcatcggttagttgaatctcatttcctgcaccaggtttttgagtttctaaaatattaaaaatttctggagttaacaagtagcgaccaatgattgccaaattacttggagcctcttcgggagaaggtttttcaacgaaagtgttaacgctatatagaccattaactccttctccttgtggagcaataacaccataagcagaaacatcttcatgtggaacttccataacagcaattgttgatgcatgagtagcttcaaagtcattaattaattgtttggtgagaggaataactttattattggtaatatccattagatcatcacctagcataacaacaaaaggttcattaccaacgaaggcttttgcttgtagcacagcatctccaagcccacgaggatgactttgtcgaataaaatggagtcgaatgccagttgtttcatcaacaagtttgagaagttcgtttttccctttctcttttaggttatattctaattcaaaatttgaatcaaagtggtcttctatagaacgttttgatttaccagttacaactaaaatatcttcaattccagattttagtgcttcttcaacaataaattgaatagttggtttatcaacgattggaagcatttctttagctaaagctttagtagcaggtaaaaaacgtgttcctaaaccagcggcagggataactgcttttctgactttcatatatagctcctttaaatagtattaatataaacgatattagtgccattcattctctgaacgaaattcattggacatcatatctaaaatgctatctttgatattagccccttcatatattgatttataaatagcttctgtaatgggcatgtaaacatttaagttttgggcgatttcgtaagcaactttagttgttgagataccttcaataaccatccccatatttttttcaatatcttcaagtttctcaccacgtcctaaagcatctcccgctctccagttgcgagaatgaacagatgtaccagtcacaattaaatctccaactccggataaaccactgaaagtgagagggtcggcccctaattgtacaccaagacgtgttatctcagctaaaccacgcgtaataatagctgctttagcattatcaccataaccaagaccgtgtagtgctccagcaccaacagcaataatattttttagagcaccagctgtttctactcctacgacatcagtgttagtataaagtctaaaataatgattactaaacaatttttggacatacttagctgcttcaatatcttttgaagcagcagtaatcaaagtaatatcacgaacgatggcttcttcagcatgactgggacctgaaacaacaacgatatcactacgatattgttcagagatttcttcttctaaaattgtagaaagtcgttcatgagtaccaggttctagtcccttagaagcatgcataagaacaactttatgctttaaaagattagccacttgtttagcaacaagtcttgtaactttagttgggacgacgaataaaatgctgtcaacattattaatcgcttcctcaagattagtgtaggcttttattttggaatctaaggtaatatctttgaagtaacgttgattagtatggttagtattaatctcttctatttgttcaaccacgtttccccataagcgtacctcatgtccattgtcatttaatacttgtgcaagagcagtcccccatgaaccaggtccaagaacggcaattttttgttttgtcatcttattccttctttctaataataaggcatatagcgctaacattatatcatactctaatacactttgtcttgtttagtctgttgtcaatgatagtaacattagaaaagaattgagtcttttaggttatttatggtataataaaaccaatttagataaatggagcactattttgaaaaaaacctatcgggtaaaaagtgataaggattttcaaatgattttcagcagaggtaaaaatgttgctaatcgaaaatttgttatctactatttagaaaaagaacaaaaacactttcgtgtgggaatctctgttagtaagaaattaggaaatgctgttgttcgtaacgctattaaaagaaaaattaggcatgttttactctctcagaaaacagcgctgcaagattatgattttgtcgtgattgcgcgtaaaggtgtagaggaattggactatcaagcattagaaaaaaatcttatacacgttttaaaaatagcaggactcatctagaaaggtataaaattgaagaaaaaacttaaaacatttagcttaatattgctgacaggctctttattggttgcttgcggacgaggagaagtatctagtcattcagccacattatgggagcaaatagtttatgcatttgctaaatcaatacaatggctctcctttaaccattcaattggtttgggaataatcttattcactctaataatcagagcgattatgatgccgctttataatatgcaaatgaaatccagccaaaagatgcaggaaattcagccaaggctcaaggaattacaaaaaaaatatccagggaaagatcctgataaccgtttaaagctaaatgatgaaatgcaatctatgtataaagctgagggagttaacccatatgcaagtgtattacctcttctaattcagttacctgtcctatgggctcttttccaagctttgactagggtttctttcttaaaagtaggaacatttttgagcctagaattatcacagccggacccatattatattttacctgtactggcggccttatttacctttttatcaacttggttaactaacaaagcagctgttgaaaaaaatattgctttaactcttatgacttatgttatgccgtttatcatattggtaacaagctttaactttgctagtggtgttgttttatactggacggtgtctaatgcttttcaagtatttcaaattctattattgaacaacccatacaagattataaaggttcgagaagaagcagtaagagtggcacatgaaaaagaacaaagagttaaacgtgctaagagaaaagcaagtaagaaaagaaagtaggaaaaccatggtattatttacaggagcgactgtagaagaagctattgaaaaaggactacaagagttaaacatttcacgattgagggcacatataaaagttgtatcacgtgagaaaaaaggttttttgggctttggtaaaaagccagcaaaagttgaaatagaaggtatcaccgacgaagtaactgatattaatgaatcggtagcgttaaaaaatattaagaatgtaccgtctagcgtagatgtggtggaagaatatatagaggaggttgatgaaacgcttgaaaaagaagacgtatcacaaccagaacttccaaaaattgatgataaaaacgttgtaactacaagtgaagctattgaaaaaattgacctacttcctaatattgaagtagcagctgctcaggtgactaaatacgttgaaaatatcatctatgagatggatttagatgcaacaatagaaactacgacaagtaagcgacaaataaatctccaaatagaaacgccagaagctgggcgcatcattggttatcatggaaaagtattaaaatcgttgcagttgttagcacaaaattatcttcatgaccgcttttctaagagtttttcagtatccattaatgtccatgactacgttgagcatcgtacagaaactttaattgatttttctaaaaaaatagctaggcgtgttttagagactaatgaaccttaccatatggatcctatgagtaacagtgagcgaaaaactgttcataaaacaattgcaactatagagggtgttgaaagttattctgaaggtaacgatcctaatagatttgtagtagttactaagaaataaaaagaggtgagacctctttttttcttgcgctctatctacattttcagaaaatgtagaaaaagtatgaaaaaagagttgacaaagtaagagatgatgtagtaaactaaataagttgtctcgagagagcagtttctattagcgcgtagttaacaacttaaaaaaagtagttgacaaagcagaataagtttgctagaatatagaagttgtctcaagagaggcaaagacctttgaaaactgaacaagacgaacgaatgtgcagggtggatttacattgtaaatccgtcaatgacaaaaaaacaataaatctgtcagcgagacagaaaagagcaaagctcaaacttttaatgagagtttgatcctggctcaggacgaacgctggcggcgtgcctaatacatgcaagtagaacgctgaggtttggtgtttacactagactgatgagttgcgaacgggtgagtaacgcgtaggtaacctgcctcatagcgggggataactattggaaacgatagctaataccgcataagagtaattaacacatgttagttatttaaaaggagcaattgcttcactgtgagatggacctgcgttgtattagctagttggtgaggtaaaggctcaccaaggcgacgatacatagccgacctgagagggtgatcggccacactgggactgagacacggcccagactcctacgggaggcagcagtagggaatcttcggcaatggacggaagtctgaccgagcaacgccgcgtgagtgaagaaggttttcggatcgtaaagctctgttgttagagaagaacgttggtaggagtggaaaatctaccaagtgacggtaactaaccagaaagggacggctaactacgtgccagcagccgcggtaatacgtaggtcccgagcgttgtccggatttattgggcgtaaagcgagcgcaggcggttctttaagtctgaagttaaaggcagtggcttaaccattgtacgctttggaaactggaggacttgagtgcagaaggggagagtggaattccatgtgtagcggtgaaatgcgtagatatatggaggaacaccggtggcgaaagcggctctctggtctgtaactgacgctgaggctcgaaagcgtggggagcaaacaggattagataccctggtagtccacgccgtaaacgatgagtgctaggtgttaggccctttccggggcttagtgccgcagctaacgcattaagcactccgcctggggagtacgaccgcaaggttgaaactcaaaggaattgacgggggcccgcacaagcggtggagcatgtggtttaattcgaagcaacgcgaagaaccttaccaggtcttgacatccttctgaccggcctagagataggctttctcttcggagcagaagtgacaggtggtgcatggttgtcgtcagctcgtgtcgtgagatgttgggttaagtcccgcaacgagcgcaacccctattgttagttgccatcattaagttgggcactctagcgagactgccggtaataaaccggaggaaggtggggatgacgtcaaatcatcatgccccttatgacctgggctacacacgtgctacaatggttggtacaacgagtcgcaagccggtgacggcaagctaatctcttaaagccaatctcagttcggattgtaggctgcaactcgcctacatgaagtcggaatcgctagtaatcgcggatcagcacgccgcggtgaatacgttcccgggccttgtacacaccgcccgtcacaccacgagagtttgtaacacccgaagtcggtgaggtaaccttttaggagccagccgcctaaggtgggatagatgattggggtgaagtcgtaacaaggtagccgtatcggaaggtgcggctggatcacctcctttctaaggataaggaaacctgccatttgcgtcttgtttagttttgagaggtcttgtggggccttagctcagctgggagagcgcctgctttgcacgcaggaggtcagcggttcgatcccgctaggctccattgaatcgaaaggttcaaattgttcattgaaaattgaatatctatatcaaattccacgatctagaaatagattgtagaaagtaacaagaaaataaaccgaaaacgctgtgaatatttaatgagttttctagttttaaagaaactaggttaataaggttaagttaataagggcgcacggtggatgccttggcactagaagccgaagaaggacgtgactaacgacgaaatgctttggggagctgtaagtaagcgctgatccagagatgtccgaatgggggaacccactagttaatgactagtatccatatctgttaaggatatgagaaggaagacgcagtgaactgaaacatctaagtagctgcaggaagagaaagcaaaagcgattgccttagtagcggcgagcgaaacggcaggagggcaaaccgaagtgtttacacttcggggttgtaggactgcgatataggattaatcattatagaagaattacctgggaaggtaagccaaagagagtaacagcctcgtatttaaaatgatagattaaccttagcagtatcctgagtacggcgagacacgcgaaatctcgtcggaatctgggaggaccatctcccaaccctaaatactctctagtgaccgatagtgaaccagtaccgtgagggaaaggtgaaaagcaccccgggaggggagtgaaatagaacctgaaaccgtgtgcctacaacaagttcgagcccgttaatgggtgagagcgtgccttttgtagaatgaaccggcgagttacgatatgatgcgaggttaagttgaagagacggagccgtagggaaaccgagtcttaatagggcgtcatagtatcatgttgtagacccgaaaccatgtgacctacccatgagcaggttgaaggtgaggtaaaactcactggaggaccgaaccagggcacgttgaaaagtgcttggatgacttgtgggtagcggagaaattccaaacgaacttggagatagctggttctctccgaaatagctttagggctagcgtcgatgttaagtctcttggaggtagagcactgtttgggtgaggggtccatcccggattaccaatctcagataaactccgaatgccaacgagatataatcggcagtcagactgcgagtgctaagatccgtagtcgaaagggaaacagcccagaccaccagctaaggtcccaaaatatatgttaagtggaaaaggatgtggggttgcacagacaactaggatgttagcttagaagcagctattcattcaaagagtgcgtaatagctcactagtcgagtgaccctgcgccgaaaatgtaccggggctaaaacatattaccgaagctgtggatgacacaaaagtgtcatggtaggagagcgttctatgtgtgaagaaggtgtaccgtgaggagcgctggaacgcatagaagtgagaatgccggtatgagtagcgcaagacaggtgagaatcctgtccaccgtaagactaaggtttccaggggaaggctcgtccgccctgggttagtcgggacctaaggagagaccgaaaggtgtatccgatggacaacaggttgatattcctgtactagagtatatagtgatggagggacgcagtaggctaactaaaccagacgattggaagtgtctggtcaaacagtgaggtgtgatatgagtcaaatgcttatatctttaacattgagctgtgacgaggagcgaagtttagtagcgaagttagtgatgtcacactgccaagaaaagcttctagcgatacatatactctacccgtaccgcaaaccgacacaggtagtcgaggcgagtagcctcaggtgagcgagagaactctcgttaaggaactcggcaaaatggccccgtaacttcgggagaaggggcgctgattttagatcagccgcagtgaataggcccaagcaactgtttatcaaaaacacagctctctgctaaatcgtaagatgatgtatagggggtgacgcctgcccggtgctggaaggttaagaggagtgcttagcgtaagcgaaggtatgaattgaagccccagtaaacggcggccgtaactataacggtcctaaggtagcgaaattccttgtcgggtaagttccgacccgcacgaaaggcgtaatgatttgggcactgtctcaacgagagactcggtgaaattttagtacctgtgaagatgcaggttacccgcgacaggacggaaagaccccatggagctttactgcagtttgatattgagtatctgtaccacatgtacaggataggtaggagcctatgataacgggacgccagtttcgtttgaggcgttgttgggatactacccttgtgttatggctactctaacccagataggcaatccctatcggagacagtgtctgacgggcagtttgactggggcggtcgcctcctaaaaggtaacggaggcgcccaaaggttccctcagactggttggaaatcagtcgtagagtgtaaaggtataagggagcttgactgcgagagctacaactcgagcagggacgaaagtcgggcttagtgatccggtggttccgtatggaagggccatcgctcaacggataaaagctaccctggggataacaggcttatctcccccaagagttcacatcgacggggaggtttggcacctcgatgtcggctcgtcgcatcctggggctgtagtcggtcccaagggttgggctgttcgcccattaaagcggcacgcgagctgggttcagaacgtcgtgagacagttcggtccctatccgtcgcgggcgtaggaaatttgagaggatctgctcctagtacgagaggaccagagtggacttaccgctggtgtaccagttgtcttgccaaaggcatcgctgggtagctatgtagggaagggataagcgctgaaagcatctaagtgcgaagcccacctcaagatgagatttcccatgattttatatcagtaagagccctgagagatgatcaggtagataggttaggagtgtaattgtggtgacacatttagcggactaatactaatagctcgaggacttatccaaaaagagatattgacaacgttacggtttcttgttagactatagatattcaattttgagtgaataaggctcaatagttaagtgataattgcctaggagatacacctgttctcatgccgaacacagaagttaagccctagaacgccggaagtagttgggggttgccccctgtgagataaggtagtcgcttagcaaagggagtttagctcagctgggagagcatctgccttacaagcagagggtcagcggttcgatcccgttaactcccatagaagcgggtgtagtttagtggtaaaactacagccttccaagctgttgtcgcgagttcgattctcgtcacccgctttactttataagaaagtaaaaaccaagcaatagcttgggcgcgtagctcaggtggttagagcgcacgcctgataagcgtgaggtcggtggttcgagtccactcgtgcccatcaagaatatggtccgttggtcaaggggttaagacaccgccttttcacggcggtaacacgggttcgaatcccgtacggactattcttaaaaaagtagaaagtgatctttctactttttttattttaagtatatatttttgcaatagtattgtaattaaatttgatattaataaaaacacactatttagtgtgttagttagcgctttttcaattcaaggtaccgtttataccagatattgatatatgatgatgaaaaggggcctttattctcatttatccattctaccaatatttttacattttcctttaatatataatcaatatcggtaggatagttcatctgagctttatgctgttcatattcgtccacatctagtagtcttttttcaccatctgcaaatactttgacatcaaggtcatagtcaatatacttgagtgcttcagggtccaagatatacggacttgctagattacaatagtaggagacaccagtttcacgtatcatagcgataatgttaaaccagtattttttatgaaagtatactattgcaggctctcgtgtcacccagcgtcgaccatcattttctgttactaaagtatgatcattaacaccaatgagggcattttcggttgtttttaataccatggtgtcacgccaagttcggtgtaaactaccatcatgtttgtaactttgaattgtaataaagtcgccttctttaggtaatctcatagcctaccaactttctacaatttatacgtctgttatagtttatcataattttctgtaaaatacatcgtctgagagttattatcttataaatattctcttaaagcacttttgatatcttcgtactggtatcctttacgcattaaggcattgattatacgttgctttaattcatactggtcatgtttttttgataatttttggtattgtttatctaattctttataaatgaggtcttcttcaagttcttgatctttttcaatttcaaggttttgaattacggtatgcactatctgataatcaaatccttttgtagttaagctctgcatcaatttatcttttaatgcttttagtggaagtttgttttgatattttttatagagtttttggcttattttggatgctaagtcttgaaagtttatagcttgaagttcagattcaattattttacttttgatacctttttgcaataatttttgttttatcacgtatggtcccttatcgccagtatttagattttgctgtatgaaagattgcacgtagtttttatcgtttatccaattctcactttttagattatcaataatttgtggaataattttagaatcaatatcatgttgttgaagatatttaataacttctttctcggttctctgcttgaaagaaatataataaagacctagatttttaccgtatgatagttgggcaaattttttaatattttcaagtttctcggcattaattatcatccctttacttaacataaaatgaacgatagtatcttctgttatatataaattttcggtattgtctagctctagagtgtaaagtctttttttcttttcgattttggttattttcatagtttttattatagcaaaaatgataaaatagtaaaaatgagtctttttttaaatgttatggatttatagtattttcttagttagggagtaatgaactgatgaatgtggttttaaaacagcgaattcctttaaaaattaaacgaatgggaattaatggtgaaggaataggtttttataaaaaaacactaatctttgttccaggggccctcaagggagaagaggtgttttgtcagatttcttctgttagacgtaattttgcagaagctaaactgttaaagataaataaaaaatctaaaaatagggtagaacccccttgttctatttataaagaatgtgggggatgccaaataatgcaccttcaatatgataagcagctagagtttaaaacggatgttattcgacaggctctaatgaaatttaaaccagagggatatgagaattatgaaatccgtaaaacgataggtatgtcggaacctgaacactatcgtgctaaattacaatttcaagtgcgttcgtttggagggaatgtaaaggcaggtttatatgcacaagggacacatcgattgattgatatcaaagattgtttagtgcaagatagccttactcaggaaatgataaatcgagttgcagaacttttaggaaaatataaattgcctatttataatgaacgtaaaatagctggtgtccgtactgttatgattcgacgagcacaagcgagtggagaggttcaactgatctttatcacaagtaaaagacttgattttgatgatgttgttattgaattagttcgagagtttcctgagttaaagacagttgctgtaaatatcaacgctagtaaaacaagtgatatctatggtcaaataacagaagttatttggggtcaagaatccatcaatgaagaagtattagattatggtttttcgttatcaccacgtgctttttatcaacttaatcctaaacaaacacaaattttatatagtgaggcagttaaggccttagatgtgaaggaagatgatgatttaattgacgcttattgtggagtaggaacgattggacttgcttttgctggaaaagttaaaagtgttcgtggaatggatattatccctgaggctattcaggatgctaaagagaacgcactttatatgggttttactaatacacattacgaagctggaaaggcagaggatattatccctaggtggtatagtgagggatttcgcgctaatgcgttaatcgtggatcctcctcgcacaggtttagatgataaattgctaaatactatactaaaaatgcctccagaaaaaatggtttacgtttcttgtaatacatccacgcttgctagagacttagtaacattaacaaaagtataccatgtccactacatccaatccgttgacatgtttccacatacagcaaggaccgaggctgtagtgaaactacaacgtaaggaataataaagttttctaatcaaaaaataagagtatttttgggtattcttatttttagatagtaatggtgagatattaatataacatagtctaaaaacacatggtttaagctatttgatacggaaatttaccttagaaatggtaaatagttccattaagtatattcatctttgcaaatttgaccttgccttttaagtttcattgagttaaaatagaaaaaatatttttaacaagatgatagaacatcgtaaattaaggtttaaaggaaatgcttatgataataaattcattcgataatagtagaaaagcgattattaatcctgaagatattaattcaccaataaaaggttttccaaagactgttattacctgtttcgcgcgggagactttcaatcgtattttagaagaattgcctcatcgtgaaattgctagaactagtgtagcaaacttagaaattcccatttatgaattagaatttaaaggacaaaagattggctttttcaatgcttatgttggtgcttcagcttgcgtagcaatcttggaagatattatagtatttggaatggaaagtttaattgtttttggaacatgtggcgtccttgattcgtcaattgaggagacatccattattattccaagaagtgctattagggatgaagggacatcatttcattattcggaagcaagttctgaaattgcagtaaacacaaattcaatttttttactctgcggataatttagatgcagaagtatgggaagcaagatctttaggaaatagcgaggatttagaaaagaaagataaaattgcttatattgccatggagtttgctatagagactttttagggtctactgtatgatgttgaaaggaagatagcaatgtggaatgtaaaaacttttgataatttaactacacatgagttgtttcaaatatataaattaagagtatctgtatttgtggttgaacaagattgtccttatcaagaggttgatgatgaagatttgatttgtttgcatgggatgaattgggtagatggtcaattggcagcttattatagattgataccagaagatgataaggtgcatttgggacgtgtgattgttaatccagactttagaaaaaagggattaggaaatcaattagtggaatatgcgattaaatttagtgaggcaaattaccctaataaacctatttatgctcaggcccaagcttatttacaagatttttatcaatctttcggatttcaacctgtctcagatatctatctagaagataatattcctcatcttgatatggttttattataaatacatgctatttaaactatcaattaaaaggtctctcagtattgctgagagatcttttaattaacaaaaaattaaaaaatttaaattaaaaaataaaaataaaatttatcgctaattattctattgctaataaattaattatgttgtaatatagtatgcatactgatttttggaggaaataggaaaagtggataaacatcactcaaaaaaggctattttaaagttaacacttataacaactagtattttattaatgcatagcaatcaagtgaatgcagaggagcaagaattaaaaaaccaagagcaatcacctgtaattgctaatgttgctcaacagccatcgccatcggtaactactaatactgttgaaaaaacatctgtaacagctgcttctgctagtaatacagcgaaagaaatgggtgatacatctgtaaaaaatgacaaaacagaagatgaattattagaagagttatctaaaaaccttgatacgtctaatttgggggctgatcttgaagaagaatatccctctaaaccagagacaaccaacaataaagaaagcaatgtagtaacaaatgcttcaactgcaatagcacagaaagttccctcagcatatgaagaggtgaagccagaaagcaagtcatcgcttgctgttcttgatacatctaaaataacaaaattacaagccataacccaaagaggaaagggaaatgtagtagctattattgatactggctttgatattaaccatgatatttttcgtttagatagcccaaaagatgataagcacagctttaaaactaagacagaatttgaggaattaaaagcaaaacataatatcacttatgggaaatgggttaacgataagattgtttttgcacataactacgccaacaatacagaaacggtggctgatattgcagcagctatgaaagatggttatggttcagaagcaaagaatatttcgcatggtacacacgttgctggtatttttgtaggtaatagtaaacgtccagcaatcaatggtcttcttttagaaggtgcagcgccaaatgctcaagtcttattaatgcgtattccagataaaattgattcggacaaatttggtgaagcatatgctaaagcaatcacagacgctgttaatctaggagcaaaaacgattaatatgagtattggaaaaacagctgattctttaattgctctcaatgataaagttaaattagcacttaaattagcttctgagaagggcgttgcagttgttgtggctgccggaaatgaaggcgcatttggtatggattatagcaaaccattatcaactaatcctgactacggtacggttaatagtccagctatttctgaagatactttgagtgttgctagctatgaatcacttaaaactatcagtgaggtcgttgaaacaactattgaaggtaagttagttaagttgccgattgtgacttctaaaccttttgacaaaggtaaggcctacgatgtggtttatgccaattatggtgcaaaaaaagactttgaaggtaaggactttaaaggtaagattgcattaattgagcgtggtggtggacttgattttatgactaaaatcactcatgctacaaatgcaggtgttgttggtatcgttatttttaacgatcaagaaaaacgtggaaattttctaattccttaccgtgaattacctgtggggattattagtaaagtagatggcgagcgtataaaaaatacttcaagtcagttaacatttaaccagagttttgaagtagttgatagccaaggtggtaatcgtatgctggaacaatcaagttggggcgtgacagctgaaggagcaatcaagcctgatgtaacagcttctggctttgaaatttattcttcaacctataataatcaataccaaacaatgtctggtacaagtatggcttcaccacatgttgcaggattaatgacaatgcttcaaagtcatttggctgagaaatataaagggatgaatttagattctaaaaaattgctagaattgtctaaaaacatcctcatgagctcagcaacagcattatatagtgaagaggataaggcgttttattcaccacgtcagcaaggtgcaggtgtagttgatgctgaaaaagctatccaagctcaatattatattactggaaacgatggcaaagctaaaattaatctcaaacgaatgggagataaatttgatatcacagttacaattcataaacttgtagaaggtgtcaaagaattgtattatcaagctaatgtagcaacagaacaagtaaataaaggtaaatttgcccttaaaccacaagccttgctagatactaattggcagaaagtaattcttcgtgataaagaaacacaagttcgatttactattgatgctagtcaatttagtcagaaattaaaagaacagatggcaaatggttatttcttagaaggttttgtacgttttaaagaagccaaggatagtaatcaggagttaatgagtattccttttgtaggatttaatggtgattttgcgaacttacaagcacttgaaacaccgatttataagacgctttctaaaggtagtttctactataaaccaaatgatacaactcataaagaccaattggagtacaatgaatcagctccttttgaaagcaacaactatactgccttgttaacacaatcagcgtcttggggctatgttgattatgtcaaaaatggtggggagttagaattagcaccggagagtccaaaaagaattattttaggaacttttgagaataaggttgaggataaaacaattcatcttttggaaagagatgcagcgaataatccatattttgccatttctccaaataaagatggaaatagggacgaaatcactccccaggcaactttcttaagaaatgttaaggatatttctgctcaagttctagatcaaaatggaaatgttatttggcaaagtaaggttttaccatcttatcgtaaaaatttccataataatccaaagcaaagtgatggtcattatcgtatggatgctcttcagtggagtggtttagataaggatggcaaagttgtagcagatggtttttatacttatcgcttacgttacacaccagtagcagaaggagcaaatagtcaggagtcagactttaaagtacaagtaagtactaagtcaccaaatcttccttcacgagctcagtttgatgaaactaatcgaacattaagcttagccatgcctaaggaaagtagttatgttcctacatatcgtttacaattagttttatctcatgttgtaaaagatgaagaatatggggatgagacttcttaccattatttccatatagatcaagaaggtaaagtgacacttcctaaaacggttaagataggagagagtgaggttgcggtagaccctaaggccttgacacttgttgtggaagataaagctggtaatttcgcaacggtaaaattgtctgatctcttgaataaggcagtagtatcagagaaagaaaacgctatagtaatttctaacagtttcaaatattttgataacttgaaaaaagaacctatgtttatttctaaaaaagaaaaagtagtaaacaagaatctagaagaaataatattagttaagccgcaaactacagttactactcaatcattgtctaaagaaataactaaatcaggaaatgagaaagtcctcacttctacaaacaataatagtagcagagtagctaagatcatatcacctaaacataacggggattctgttaaccataccttacctagtacatcagatagagcaacgaatggtctatttgttggtactttggcattgttatctagtttacttctttatttgaaacccaaaaagactaaaaataatagtaaataaaactaagtaaactactcggcaatatgatgaaaagttcagtttaacattatgttaagctggacttttagggtattgactcttatttttgattaattttatattgattaatgacatataatattataatattataattacgattagtatgtgataccgttcactttgtaagctttcataagatgaactagccttaaggagttttgatagcaatgaaaacgataaaagattggcaaataaatatttgcttagcgacctataatggtcaaaaataccttcgccagcaattagatagcataatacaacaaggttatactgactggatttgtttaataagggacgatggatctactgatgatacagtagctattattaaagaatatgttaatagagattcacgttttatatttattaattctaacgatgacagaaagttaggaagtcaccgcagtttttacgagttggttaactataaaaaagcagatttttatgttttctcagaccaggatgatgtttggaaagaaaatcgtttagaacgttaccttgaagaagcagagaaatttaaccaagaactaccattgcttgtttattcgaactggacttctgtagatgaaaaattaacagtattgaaagaacataatccagcaacagttattcaagaacaaattgcctttaaccaaataaatggtatggttatcatgatgaatcatgagttagcaaagctttgggaatatcgtcaaattggcgcccatgattcttatgttggaactctagcttacgccgttggaaatgtggcttatatttctgacagtacagtcctttggcgtagacaagtaggggcagagtcgctaaacaattacgggagacaatatggggtggctacgttttggcagatgataaatacttcttttgatcgtgcttcgcttatttttgctcaagtatccgataaaatgtccctggagcgtaaactcttctttagtcgttttatagaattaaaaaatgccaatctaatgagaaggatttatcttttatcaaaattaaaactccgtcggaaatcattgaaagaaacagttgctatgactatcctacttttaacaggttacggtaaaccaaaagcataatttttttggttgaaggaaatcaagttgagttgtagttaaaaatatagaaaatatttatttttcaaaaagttgttgacacttaacgaaattagtatataataatattaaagaacaaggtagaaccttggctcgcattaatttcgggttttggaaaaggagtagcaatcgctactccttttttgttttacacaggaaaagtatgaaggtaaagcctttttttataaaaattaggcttgcttaattttttaatttttatattctttacattatgatgaaaacacaagatatagtggtgatatatgttgaaagacacaaaactttgtgttagtatactgtttaagcagatccttaataaaggtaaccgacaaaaaagtttaacgtaacttaacaaaacagtggttttgaagcaagagttagcttcttaccagaataaaaaaacatcaagaagaacattccaatagttgtgtgattttaacaaaaatccagtcctcttgggaggcttttttggtgcttaaaactcgcttaattttaatatttaggagactagtttaatgcaatcatactatgatcgttctcaatcgccacttgactatgccttgtcagaaaaagcttttcctatgcgttctgttaattggaataagctaaacgatgacaaagacttagaggtatggaacagagtaactcaaaatttctggttacctgaaaagatcccagtttctaatgaccttaattcttggagaacattggatgctgattggcagcaattaattactcggacttttactggtctaaccttattagattctgtgcaggctactgttggtgatattgctcagattaagcattctcagacagatcatgaacaagttatttatgctaactttgcctttatggtagctattcatgcgcgatcttatggaacgattttttcaaccttatgcactagccaacaaattgaggaagcacatgaatgggtagtggatactgaaagtctacaagctcgatcacgtatacttattcctttttatactggtgacgatcctttgaaatctaaggttgctgcagccatgatgccaggatttttgttatatggtggcttttaccttcctttttacctttcagccagaggaaaattaccaaatacgtctgatattattcgtttaattttacgagataaggtaattcataactattacagtggctataagtatcaacagaaagttgctaaattatctgtagaaaagcaagccgaaatgaagacatttgtctttgacctcctctatcagttgattgatttagaaaaagcctatctttacgaactatatgatggttttgatttggctgaagatgcaatcagatttagcatttacaatgctggtaaatttttacaaaatttaggatatgattctccatttacagaagaagagactcgtatatctcctgaggtttttgcacaactttcggcgcgtgcagatgaaaatcatgatttcttctcaggaaacggctcttcatatattatggggattacagaagaaacattggatgaagattgggagttttaaatggatagtacagtgaaggtggtctatttttcatcgaaatctaacaatacccatcgttttgttcaaaagttggcttgttctaaccagcgtattccatcagatggtagtagtatattggttactgaggattatattttgattgtgcctacttacgctggaggaggagatgataccaaaggcgcagttccaaaacaagttgtacagtttttaaatgttcgacaaaatcgggaacattgccaaggggttatttcttctggaaataccaattttggtgacacttatgccattgctggacctattattgctcgaaaattaaatgttcctttgcttcatcaatttgaattactgggaacacaagaagatgttacaagggtaaaggagttactttgccaattcactagaaaggataaataagatgacacaatcagatgcatatctctcgttgaacgcgaagacacgctttagagatcgcacaggtaattatcattttacttcggataaagaggctgttgaacaatatatgatagaacatgttgaacctaatacgatggtgttcacatcactaattgaaaagctagattatttggtttctaataactactatgaatcggaccttctaaaacaatataaccttgagtttatttgccaaatttttgagcatgcatacgctaagaaatttgcttttctaaattttatgggggctttaaaattttataatgcttatgctcttaaaacagaagacaatcgttattatttggaacactatgaagatcgtgttgtaatgaatgctctgtttttagctgctggtgatgaaaaagctgcctatgacctagtagatgacatgctagcaaatcgctttcaaccagcaacacctacctttttaaatgcagggaaaaaacgtcgtggtgaatatatctcttgctatttgttgcgcattgaagacaatatggaatctatttctcgtgctattagtacaagccttcagttatcaaaacgaggtggtggggtagcactttgcttaaccaacttacgggaatttggtgctccaataaaaggtattaaaaatcaagctactggtattgtacctgtcatgaaattactagaagattcgttttcttacgccaatcaattaggacaaagacaaggagctggtgcagtttacttacacgctcaccatcctgaagtattaacgtttttagatactaaacgtgagaatgccgatgagaaaattcgaattaaatctctttccctaggacttgttattcctgatattacttttgaattggctaaggcaaataaagatatggccttgttttcaccgtatgacattgagcgagtatatggtaaaccaatgtctgatatctctatcacagaagaatatgaaactttattagccaatgcggatattcgtaaaacctttattagtgcacgaaaactatttcaaacgatagcagagcttcattttgaatctggttatccttatatcttatttgaagatactgtaaatgctaaaaaccctcacaaaaaagagggacgaattgttatgtctaatttatgttctgagattgcacaagttaatacagctagtcaattttcagaagacctgactttcactaaggttggacatgatgtttgttgtaatttaggttctattaatattgcgcgtgctatggatcaagcggcggattttgaaaaattaattgctaatagcattagagcccttgatcgtgtatctcgaacttctgatttagatagtgctccatctattaaaaaaggtaatgcagctaatcatgctgttggtttaggtgctatgaatttgcatggatttttggcgactaaccatatttattacgattctcaagaggctattgattttacagattgcttcttttacgctatggcttattatgcctttaaagcttctaaccatttagcaaaagaaaaaggaacctttgagggcttctcggaatcaagttatgctgatggcagttatttctatcaatataccgaacaaaactttgagccaaaaacacagcgtgttaaaaatctactagctgagtatggtctgactctaccaagccaagaggattggagaaagcttgtgcaaagtattaaagagataggattagctaatgcgcatttattagctgttgctccgacagggtcaatcagttatctttcttcttgtactccgagccttcaaccggttgtatcacctgtcgaagtacgcaaggaaggagcactggggagggtttatgtacctgcttataagattgatgcagataattatgtctactacaaaaaaggagcttatgaagtgggatctgaggcgattatcaatattgcagctgccgctcaaaaacacattgatcaagctatttcgttaacgcttttcatgacagatcaagcaactacgcgagatttaaataaagcctatattcaagcatttaaacaaaaatgtgcctctatttattatgtacgagtgagacaggacatcctagaaggtagcgagagttatgatgatatgctggatgatttcacttcatcggacttagaagactgtcaatcctgcatgatttaactaaatatactcaatcagaagattaagagaaatatattggcttttagaaaggctttattgtaatgacaaaaaaacatcttaaaacgcttgccttggcacttactacagtatcagtagtgacatacagccaggaggtatatggattagaaagagaggaatcggtcaaacaagaacaaacccagtcagcttcagaagatgattggttcgaagaagataatgagaggaaaacaaatgtttctaaagagaattctactgttgatgaaacagttagtgatttattttctgatggaaatagtaataactctagttctaaaaccgagtcagtggtaagtgaccctaaacaagtccccaaagcaaaaccagaggttacacaagaagcaagcaattctagtaatgatgctagcaaagtagaagtaccaaaacaggatacagcttcaaaaaaggaaactctagaaacatcaacttgggaggcaaaagatttcgtaactagaggggatactttagtaggtttttcaaaatctggaattaataagttatctcaaacatcacacttggttttaccaagtcatgcagcagatggaactcaattgacacaagtagctagctttgcttttactccagataaaaagacggccattgcagaatatacaagtaggctaggagaaaatgggaaaccgagtcgtttagatattgatcagaaggaaattattgatgagggagaaatatttaatgcttaccagttgactaagcttactattccaaatggttataagtctattggtcaagatgcttttgtggacaataagaatattgctgaggttaaccttcctgagagtctcgagactatttcagactatgcttttgctcacatgtctttaaaacaagtaaagttaccagataacctaaaggtcattggagaattagctttttttgataatcagattggtggtaagctttacttgccacgtcacttgataaaattagcagaacgcgctttcaaatctaatcgtattcaaacagttgaatttttgggaagtaagcttaaggttataggagaagcaagttttcaagataataatctgaggaatgttatgcttccggatggacttgaaaaaatagaatcagaagcttttacaggaaatccaggagatgaacattacaacaatcaggttgtattgcgcacaaggacaggccaaaatccacatcaacttgcgactgagaatacttacgtcaatccggacaaatcattgtggcgtgcaacacctgatatggattataccaaatggttagaggaagattttacctatcaaaaaaatagtgttacaggtttttcaaataaaggcttacaaaaggtaagacgtaataaaaacttagaaattccaaaacaacacaatggtattactattactgaaattggtgataacgcttttcgcaatgttgattttcaaagtaaaactttacgtaaatatgatttggaagaaataaagctcccctcaactattcggaaaataggtgcttttgcttttcaatctaataacttgaaatcctttgaagcaagtgaagatttagaagagattaaagagggagcctttatgaataatcgtattggaactctagacttgaaagacaaacttatcaaaataggtgatgctgctttccatattaatcatatttatgccattgttcttccagaatctgtacaagaaataggacgttcagcttttcgacaaaatggtgcgcttcaccttatgtttatcggaaataaggttaaaacaattggtgaaatggcttttttatccaataaactggaaagtgtaaatctctctgagcaaaaacaattaaagacaattgaggtccaagctttttcggataatgcccttagtgaagtagtcttaccgccaaatttacagactattcgtgaagaggctttcaaaaggaatcatttgaaagaagtgaagggttcatctacattatctcagattacttttaatgcttttgatcaaaatgatggggacaaacgctttggtaagaaagtggttgttaggacacataataattctcatatgttagcagatggtgagcgttttatcattgatccagataagctatcttctacaatggtagaccttgaaaaggttttaaaaataatcgaaggtttagattactctacattacgtcagactactcaaactcagtttagagaaatgactactgcaggtaaagcgttgttatcaaaatctaacctccgacaaggagaaaaacaaaaattccttcaagaagcacaatttttccttggtcgcgttgatttggataaagccatagctaaagctgagaaggctttagtgaccaagaaggcaacaaagaatggtcatttgcttgagaggagtattaacaaagcggtattagcttataataatagtgctattaaaaaagctaatgttaagcgcttggaaaaagagttagacttgctgacggatttagtcgagggaaaaggaccattagcgcaagctacaatggtacaaggagtttatttattaaagacgcctttaccattgccagaatattatatcggattgaacgtttattttgacaagtctggaaaattgatttatgcacttgatatgagtgatactattggcgagggacaaaaagatgcatatggtaatcctatattaaatgttgacgaggataatgaaggttatcataccttggcagttgccactttagctgattatgaaggtctttatattaaagatattttaaatagttcccttgataagattaaagcaatacgccagattcctttggcaaaatatcatagattaggaattttccaagctattcgaaatgcagcggcagaagcagaccgattgcttcctaagacacctaaggggtacctaaatgaagtcccaaattatcgtaaaaaacaagtggagaaaaatttaaaaccagttgattataaaacgccgatttttaataaggctttacctaatgaaaaggtagacggtgatagagcggctaaaggtcataatataaatgcggagactaataattctgtagctgtaacaccaataaggtccgagcagcaattacataagtcacagtctgatgtaaatttacctcaaacaagttctaaaaataattttatatacgagattctaggatacgttagtttatgtttgcttttcctagtaactgctgggaaaaaaggaaaacgagcaagaaaataaggagaaattaatatgattacacaagaaatgaaagagattattaatagtcagttagcaatggtcgcgacggttgatgctaaaggtcaacccaatattggcccaaaacgttctatgcgtctctgggatgataaaacgtttatttataatgaaaatacagatggtcaaactcgtattaacattgaagataatgggaaaattgaaattgcctttgttgatcgtgaacgtcttttaggttacaggtttgtgggaactgctgaaattcaaacagaaggtacttattacgaagcagcgaaaaaatgggcagaaggacgcatgggggttccgaaagcagttggtattattcatgtcgagcgtatttttaatttacaatctggtgctaatgcaggtaaagaaatcacttaatataaaaaagcctcaagaaggggcttttttatattaagcaatactagattaagtttgttttcgagttattagtaatatctgcgatagcaagccaaatttccatttgataatcagtatcttgtggatgttgagatgaataaatttctaagtttggcgagttagctggttttagattattctcttgaaaaaatccttgtattatttttcgccatgtttcttgaagactcgatggcattggacctttaacagaaatgactgcataggtagcgcttgggatcctaataatttctaacccttttggggcttggacacttgtctctacttgataagtggcactgtaatcgaaacgaaaatcaggttgtgttttacaaatgccaatggcttgctggataccttcttgatttgactttacattttctaaagttactccagcaagtatcattgctggcttttcaacaatttgaaatgatagcataaaaatctttattctttatgattccttaagtaattatagagtcgttaaaatagtttctttttagaataattgtcttgttagcaatcataattttcttttggaatgatatggttcaaagaagaaatcttatgatatagagtattctctaagaggcacttattttatagcttttttctaaaaaaaatctattgactatttttgtttatttctctaaagatgatggattaatctttattctttaataacgccatggtgtctcataagggtaccaacgatttgctgaatgagatgctaatctagaaaatggataaacttctttaccctcttttttcaacatatcttctagataatctctcagcatacaaacatctccaggataagtaacatcaagacttaaaagagattcaacttcactgatattaagttgcaagtctttagcaacttgtttaataggataatttaaccttctaaaattttcttgtaattcaaaggttgtatctttcatttcttgaatagtaagcatatcattctcctaatagttggtttaataattggttgatctttctttttggcttttgggaaagtatctctcttgctatgtctgttattttatatccaaatttccttagctttattaaaggctgaccaagcttttggccatccaacataaaaagcgaggtgagtgataatgtcagcaatttcttctttagtaactccgttttgtttggcaaattgaagatgatgctctaactgttcaagatttcctccgctaattaaggcagatatagtaataatagaacgtgttttatctgttaaatgatcctcttttgcccaaacctcaccaaataaaatatcatcattatatctggcaaattcaggtgcaaattcttctaattgacgacgtccggctgtttgtttttctttcataatggattcctccttacttgaatttaacctagtcttgaatattcttcatcactaacagcttcataaaactcactcttaccagctgtaatcgcaatatgtgcaaattcagaatcttttttagcaccatgccaatgtctaacacctttatctgtaacgataacgtcgcctggttttaatgacactgcttcttttccttcttcttggtaccaacctgaaccttctgtaacgagaaggatttgataaccgtccaaatgaacatgccaattattacgacagcctgcttcaaaggttacatttccaactgaaacattcccatctggagattttgctaatgctgcgagataggattgcccaataaagaattcaccatatggatttttttcacccttaggaaagatagacttagttgtttcttgcataagatttcctcatttcgttgttggatcaaaaagttcttgttctctaggaacaactttattttgataattgtctattttgtgatttagacgattaagtgcttcttggaggccttgaagcctatcttcaagattgtcgcgttcatcttttaaaatttctagcctagctgggatagtggaatcgcctttttcaaccaaatgaatataatcaatgagactttcaacggaaacacctgcgcctctaaaatagcggacaaattctaaaatatcaatatcgttttgtgtgaactcacgaattcctgattcactccgatgaatagggggaataagattaattctctcataatacctgatggtatctgacgtaatgccagtctttttactaacttctttgatatgcatttttaacctcgatattcagtcaacaatcactaaggatttgatagcgtcacgtttatccattgcttcataagccttttgaatatcatctaatacaaaggattttgtaaaaactaagcctgggttaattttatgagttagaacagcatctaaaaggacagacttatcaaatgttgttacagaagcaatgccacctctaaggccgatatttttccagaataaattattggtattcatgtctggattttgtgggataccaacacgtcctatgacagcaccaggcctagcaatttgggtagctgtatcaacagactgctctgtaccaacacattctaaaacagcatcggcacctgcttgattggttaaatctaaaacacgtttaacggcttcgtcaccccgttcttcgacaatatccgttgcaccaaaagtcaatgctagttcctgcctatctttgtgacgactcattgcaatgatacggttagcacctaacattttagcagcgataacaccacagagtccaacagcaccatctcccatgacaactaccgtgtcaccttctttaacttctgcagttgctgcagcatgataaccagttgccattacatctgataaggtgagcagagagttaagagtctcattatcataatcagaaggttgtcctgggatcttaaccaatgcccagtttgcattagtataacgtagatattgaccttggtatcctacattttttgcagcttgatgatttgtacaatttccatcaaatccagccttacaagacggacattggccacagccatgtgtaaagggaacaataacaaaatcaccttttgacacgtcagttactttagtaccaacttcctcaacgataccaatagcctcatgacctgcaaaagaaccactttcacgttttgaaataccacgataccaccacaagtctgaaccacaaacacaggctctaacaattttgataacagcatctgtctcttgttcaatgactggttttggtgtatcagttataaccattttgccaggttcaataaatgtagctactttcataaccttacctcttttctataacttcattataactcttagagttaacttcaagtcaagaaaaacttaaaaattttgaaaattaaacatctgtaaaaatccgcatatggtttcattttccactaaaaacagggaagttagaaaattccccataatcgtcaaacataagtgattttaatatcgacatatcttcgtcactaattacaaagtcaaagtctagattagactgtaaatgttctttactagaagcctttggtaaaacgatcaggtttaattgtagtaaatattgaatacataattgagcaacactaaccccatatttttcagccattttttgaataccatcagatttcaatgcttgtccatgtgcaattggtgaataggcttcaacttgaatacctttactttgacagtaatcaatcaagtcgaaaggtgtatttccgatgtgagctaagatttgattgacagcaggtttaacatgaccattttttaagatattttctaagtctttttctaaaaagtttgagacaccgatggatttcatcttaccagatttttgagcatcctctaaagctctccaagcttctaaatttccttggtcaaaatgtttatctgtttcacgccattccttccaaggctgtggactatgaataatcattaaatcaatataatcaagccctaaagcttctagtgattgatcaattgattttgtagcactttcataatctttatgttcagcggcaattttagtcgtaacaaataaagattcacgtgtaataccagactctttaatccctacaccgacacctttttcattgttgtatgcttgtgcagtatcaatatggcggtagcctaattcgatagcatctttaacaacttgagctaccctatcattatctatcatccacgtacctaaacctaaagttggtattttatgattgtcatttaatatcattgtatctgtcatctttattttccttctttcattagtattgacctaatcttaacacttagagttaactccaagtcaaggaaaaaactaacactcaggttagttttttaatggtttgcaatgattttgatgttctcttaaagaataatcgatttcaacagtaacatcgtttatcttataatgttggcaaatcgttcgaatagctcttttacaatctttttcagatatcaattgatttaagcaacagtgaatgattgctcgattatcaataccatccattgaccagatattgagttgattgatagatcttacttgcgaaagtcccttaagttcatcatgtaatgcagcgtaatctatggaatctggaacaccatctaaaaaaagtttcagggttgatagtaatttaggaagtgctttagataagatgaaagtagatatggcaactgataataatggatcaaggatatacaacggtttccaatttaagataagagatataacaataatagctaaccaccctagaatatcttccaaaaaatgaaggcttaatatttcctcatgtttactttgaccagaatggagaataaaactagctagaccattaatgataatagcgatgacagctagaataaacatgccgtgataattaacaggagtaggatgccacaattttgggatattttctatcatgactaagatagatccacttataagaattagacttgtgataagagctcctaaaaggctaaaacgtttataacctaatgaaaatatcgtatcttcatctttcttagattttttttctaaagtagctgagatgccaatagctattgcatcaccaaaatcatgaacagcatcggctaagatagctcctgagaagaatagacttccaaagatgaattcaaggacggaaaagctgatatttaatataaaagcgatagccacttttttgtttgatgtcatatttttctccttttgttatactggtattgtagtgtgattctttcttctattatctaggagataaaagagaattgctagaaacaaaaaagaacacttgttcaatactgaacaaaacttagaaagtgtcctatatggtaaaagatagacaaattcagaaaacaaaagtagcgatttataatgcttttataagcttgctacaggaaaatgattattctaaaataacggttcaagatgtaatcggacttgcaaatgtaggaagatcaactttttactctcactatgaaagcaaagaagtgttactcaaggagctctgtgaagacctttttcaccacttatttaagcagggtagagatgttacgtttgaagagtatttagttcatatcttaaaacattttgaacaaaatcaagatagtatcgctacgttattattatctgacgatccctattttttattacgctttagaagtgaattagaacacgatgtttaccctagattgcgtgaggagtatattacaaaggtggacattcctgaagatttcttaaaacaatttcttttatccagttttatcgagaccttaaagtggtggcttcatcaaagacagaaaatgactgttgaagatttactaaaatattatttaactatggtagagaggtaaattatagagagttgggagattctcttatttcattagcgttatcagaggtgatgaatggattgattgtctaatatagcgagttgaaattattagattaaatgagtataattcgggagataaaaaagtccccttgatgaaagagtttctttgggattgttgatgtcaccataagcaaaatgaatatttttcgattactatattgtcttaggcttttgcttatattctagtgggctaattcccactatttttttaaatgtccttgaaaaattagaagaagtggaaaatccaagtaaattggaaacttcttctactttcttattttcatctagtaattgcttagcagcttcgatttttaagtttagaaaatattgttgaatagtgatgtgtttttcttgcttaaatagttttcgtaacttcgattcactcatgtgacattctttagctatttcttctgttttaataaagcgatttagattattttcaagatatcgaatcactgcgacaatagtttgagaatgaggggtttcgagatgtttttttaaagaatgaacttgttgagtatagaataagatagcagtatcacgtaattttaaaacttcatttagacttatagttgactcgttttcttttataaaacgatctcgtgctcgataagctgtttcgatatcaagtcctgcttggatggtagcctgtgagagacgatcataaatcatgatggagtagtttttttcagatcgcaattcatctccactgattataggtacgatagaattgctaaattgttccactgtttctttcaaaagaaattcactacctgatttaacagcttttagaatattattttcaaaatgatactgatatttgtaagaactcatattctgtttagaaaattgcttaattttatctagatcaaaggagttgctccaccctttcgtgtagtaatgtaagggctctgataatttatctttcacaaccccagttagacaataattggttactattagtaattctcggatttgactaagtgagaagaaaggtaattgggatagtctatcaataaagtagtcttgttcactagcattgatttgtgtttcagtcagctttttcttaagaagtaaagggtcaataacattgctacgccagggaccgatgataatataatattgttgaatatggtggacaagaaaaagttctcctaaagagccataatgaaataaaaaatcatgttgagttttactaaagttacttaaaataaggtaatgattgtaaaaaagtgaaatagttttctcggatttatactctctgataacagaaaaattttgatcacaaacagtaatagttagacctagaagactgtgtaatgatttcaacagtagaaaatcaatcatatgagttaccacctttgatttaatatgttatctattttagagaatatttctttaaagtcaacagaataattaggtagtcgatacctttttaaccaaatatgaattaaaaaaccgaaaaagtcaaatcagaaaaaaaaaaaaaaacagattagatcggataaaaaagtatagatattctaatatttgtttttaaagcctatactttactatgtatagagctatacagaataaagtaaaggagaatattatgtttagaaggtctaaaaataacagttatgatactttacagacgaaacaacggttttcaattaagaagtttaagtttggtgcagcttctgtactaattggtattagttttttaggaggttttactcaagggcaatttaatatttctacagatactgtgtttgcagctgaagtaatttcaggaagtgctgttacgttaaacacaaatatgactaaaaatgttcagaatggtagagcatatatagatttatatgatgtgaaaaatgggaaaatagatccattacaattaattacgttaaattcacctgatttaaaagctcagtatgtcattaggcaaggcggcaattatttcacacaaccttctgaattgactactgttggtgcagctagtattaattatacagtattgaagacagatggaagtcctcatacgaagcctgatggacaagtggatattgtaaacgtttcattgactatttacaattcttcagctttgagagataaaatagatgaagttaaaaagaaagcggaagaccctaaatgggacgagggaagtcgcgataaagttttgataagtttagatgatatcaaaacagatattgataataatcctaagacgcaatcagacattgccaataaaataactgaagttactaatttagaaaaaatactagtacctcgaatcccagatgccgataagaatgatccagcaggtaaagatcagcaagtcaatgtaggtgagacaccgaaggcagaagattctattggtaacttaccagatcttccgaaaggtacaacagtagcctttgaaactccagttgatacggcaacaccgggagacaaaccagcaaaagttgttgtgacttacccagatggttcaaaagatactgtagatgtgactgttaaggttgtcgatccacgtacagatgccgataagaatgatccagcaggtaaagatcagcaagtcaatgtaggtgagacaccgaaggcagaagattctattggtaacttaccagatcttccgaaaggtacaacagtagcctttgaaactccagttgatacggcaacaccgggagacaaaccagcaaaagttgttgtgacttacccagatggttcaaaagatactgtagatgtgactgttaaggttgtcgatccacgtacagatgccgataagaatgatccagcaggtaaagatcagcaagtcaatgtaggtgagacaccgaaggcagaagattctattggtaacttaccagatcttccgaaaggtacaacagtagcctttgaaactccagttgatacggcaacaccgggagacaaaccagcaaaagttgttgtgacttacccagatggttcaaaagatactgtagatgtgactgttaaggttgtcgatccacgtacagatgccgataagaatgatccagcaggtaaagatcagcaagtcaatgtaggtgagacaccgaaggcagaagattctattggtaacttaccagatcttccgaaaggtacaacagtagcctttgaaactccagttgatacggcaacaccgggagacaaaccagcaaaagttgttgtgacttacccagatggttcaaaagatactgtagatgtgactgttaaggttgtcgatccacgtacagatgccgataagaatgatccagcaggtaaagatcagcaagtcaatgtaggtgagacaccgaaggcagaagattctattggtaacttaccagatcttccgaaaggtacaacagtagcctttgaaactccagttgatacggcaacaccgggagacaaaccagcaaaagttgttgtgacttacccagatggttcaaaagatactgtagatgtgactgttaaggttgtcgatccacgtacagatgccgataagaatgatccagcaggtaaagatcagcaagtcaatgtaggtgagacaccgaaggcagaagattctattggtaacttaccagatcttccgaaaggtacaacagtagcctttgaaactccagttgatacggcaacaccgggagacaaaccagcaaaagttgttgtgacttacccagatggttcaaaagatactgtagatgtgactgttaaggttgtcgatccacgtacagatgccgataagaatgatccagcaggtaaagatcagcaagtcaatgtaggtgagacaccgaaggcagaagattctattggtaacttaccagatcttccgaaaggtacaacagtagcctttgaaactccagttgatacggcaacaccgggagacaaaccagcaaaagttgttgtgacttacccagatggttcaaaagatactgtagatgtgactgttaaggttgtcgatccacgtacagatgccgataagaatgatccagcaggtaaagatcagcaagtcaatgtaggtgagacaccgaaggcagaagattctattggtaacttaccagatcttccgaaaggtacaacagtagcctttgaaactccagttgatacggcaacaccgggagacaaaccagcaaaagttgttgtgacttacccagatggttcaaaagatactgtagatgtgactgttaaggttgtcgatccacgtacagatgccgataagaatgatccagcaggtaaagatcagcaagtcaatgtaggtgagacaccgaaggcagaagattctattggtaacttaccagatcttccgaaaggtacaacagtagcctttgaaactccagttgatacggcaacaccgggagacaaaccagcaaaagttgttgtgacttacccagatggttcaaaagatactgtagatgtgactgttaaggttgtcgatccacgtacagatgccgataagaatgatccagcaggtaaagatcagcaagtcaatgtaggtgagacaccgaaggcagaagattctattggtaacttaccagatcttccgaaaggtacaacagtagcctttgaaactccagttgatacggcaacaccgggagacaaaccagcaaaagttgttgtgacttacccagatggttcaaaagatactgtagatgtgactgttaaggttgtcgatccacgtacagatgccgataagaatgatccagcaggtaaagatcagcaagtcaatgtaggtgagacaccgaaggcagaagattctattggtaacttaccagatcttccgaaaggtacaacagtagcctttgaaactccagttgatacggcaacaccgggagacaaaccagcaaaagttgttgtgacttacccagatggttcaaaagatactgtagatgtgactgttaaggttgtcgatccacgtacagatgccgataagaatgatccagcaggtaaagatcagcaagtcaatgtaggtgagacaccgaaggcagaagattctattggtaacttaccagatcttccgaaaggtacaacagtagcctttgaaactccagttgatacggcaacaccgggagacaaaccagcaaaagttgttgtgacttacccagatggttcaaaagatactgtagatgtgactgttaaggttgtcgatccacgtacagatgccgataagaatgatccagcaggtaaagatcagcaagtcaatgtaggtgagacaccgaaggcagaagattctattggtaacttaccagatcttccgaaaggtacaacagtagcctttgaaactccagttgatacggcaacaccgggagacaaaccagcaaaagttgttgtgacttacccagatggttcaaaagatactgtagatgtgactgttaaggttgtcgatccacgtacagatgccgataagaatgatccagcaggtaaagatcagcaagtcaatgtaggtgagacaccgaaggcagaagattctattggtaacttaccagatcttccgaaaggtacaacagtagcctttgaaactccagttgatacggcaacaccgggagacaaaccagcaaaagttgttgtgacttacccagatggttcaaaagatactgtagatgtgactgttaaggttgtcgatccacgtacagatgccgataagaatgatccagcaggtaaagatcagcaagtcaatggtaaaggaaataaactaccagcaacaggtgagaatgcaactccattctttaatgttgtagctttgacaattatgtcatcagttggtttattatctgtttctaagaaaaaagaggattaatcttttgacctaaaatgtcactaaacttttcaccatttattggtgtgaacacattaataaagttatgtatctctcttcaacaaacttaattaaagtgtttcaatttttcgagtttaattcttgaaaaatcctatcgagattattaatttcgataggattttgattttgtgtaagcgtccaataacgaggtatcttccattttcttccctattccgtaagcatccaatataccttgttattggacgcttactataaaactgaagaaatgatcctatttagttgaaatttgtaaatgaagtgtatcattagagcctaagatgttaatcctaggctctcttttgatgatttaaaatttttaggtgtaatcaaatgtaaggttagatgcaaaattttctaaaatgactgtttgtcttttcaagtaattaaatgtatttaagggtaatttataaaaataaaaggagtgtgtcaataatgttgtgtaaacacactggcaaagctgggattgttaatcaaataggctttcaagtgtgtctgtacattggccaaaacctttgtggattcgttgttcttgcttgaagttgtaatcattaaatagtgtgactagatagtattctagagcctcttcattgggaaagacgatttccttttttgtttgcgttgtattgcatttagtgatacaatagttatacaaaaatgatttgaggtgatattatgtcaacagtagcagtaagagttgatgatcaattaaaagatgatgctacagaactttttcaatccttagggttggatatgagcacagcagtaaaaatgtttttgattcaatctgttaaaactcaaagtattccttttgaaataaaaaataaatcatctgtttctgatgaagaatttcaaaatttggtagaaacaaaattaaagggaatacgagttaaggctagtgatccagaaagtgtaaatgcgttttttggagatgaagatttttcagaatatgaggaatattttaaatgagtgatattgaggtatattctgtattagtttctcgtattgaatattctgatggtacaggttcaaaggttcgtcctgctgtagtagtcaaatttaatgatgaagtaataaaaactttaagatttactactaaatatgaaaataagtctgacaatataagaagtcagtatttagaagttattgattaggcaaaagcaaatttaaataggcgttcttggatagatactattcaatattatgatgttgagaataaagggttcaatattaaaattataggtaagttaagcgatagagatgttgagaggttaaaagattttctcatagcaaaggaagtttagttatgaaaaagaaattattaggattgatgattttagctatatctacagtatttttagttgcttgttcgactaattcgttaaatgtaaagtattataaagtatatgatggtgaaaaaatgttagttttagaaattaatgatgaatcaggaatttatcataatgaaggaaactttgtagtaactaatattgatactaaaagtaaaagttttgtacttaaaggtgggtctgctaagtatactgttttatatgatgttaaaagtgatggtaaattgaatgttgatttagggaacttttattataatgcttctggtaaggagacatattataaagaaggtagcaaggctttagaaaaagcattaagagataaagaataaagttaggactattttcctaacttatttttttatttaaaaaatgaacttcaaaatgcaaagtcttaattttacttagcacctaatttttagttaaataatttgtatcccagcaataaaaagtatttttaccgaaatcaaagtaagaaccaaaaagaagatggggttactctgtcttagtttttcttggaaagtgttatctgttaattcaatgaaatcaagcgaggaaatgagatagcttttatttaattgatgagttgctttttccagattatttggagttatttgctcgtattcagaaataatattatgttatgatatcataaagagctaaattcatggtttgatttttatttctttgaaagttactaacgatcgtacttatttctttattgttcaaattggaataatctttaagtagatggaaaagtcgtatttctaaacattcctttgaaatttctaaatcaatggttatttctttgaatagtttattttcgtaaacaattttatagagtaacttgggatgatattgattttgaaagaaatagtatttatacatatcgaagatattcttcaataaaaaatgactttacaaagcctaaaacaaggacttcaataaggagagtttcagtaagtcatgatttaaaagagttattgcttgaactaaaatttcaacaagaaagaatgctgaaaggtttgcatataaaaaatacagatcaattgattttttatgactataggtttggtatgatatcaaatgatgctgttaacaaattcttggcaagctcattggaaaaattagaaatagaatctaagatgtcatcaacaggtgctagacatacttatggaagttatttgttggctaacggagtagatatttgggcggttgcaaaattaatggggcataaagatatcaaacaattaatagaaacatatggtcatttgcttctgtaagtggaagaaaaggaaaatgatcagcttttaaaaattcttaataataaaggtagtttttaaaatgactatcaagaacaaattaagaacaaaaataaaagaaaccctattataataaggtttcactcatatattttctgccaccaccgagaattgaactcggaattgagcattaccattgctctattataccatttaactatagcggctacttttctatgatactataagattttgacgaaatcaagtatttctttacttagaaaaatagtcgtttttttagtctaattctatttggagaaatttactattttcaatagctcttaaatggtgtgtttcttgtggagagaggctaataaggctatctttttcaaggatatgtttctgatcaccaaggataatttcaagttttctttccaaaacatttattaattttggatgagggcatcgttcatttttcagtccccggctgatgattttaatggtattgaataaaccttcatctttaatcattcctaacggggacataagacttatttttccaaattgatattctgaactttaaaaaccattttgtaagaataaattttgccaatcatctatttttagaggagcaacgttaacattcatagtatgtctaagttgatcgatcagcttggcagtgtcttcatcttgataagaaacatcatgtgtgagtaaacgtccaccaggttttaggacacgtaagtactcttttatggctttctccttagctgaattgttaagcatcgttaacattgcttcgttgataacgataaactattatcaggaaagggcagtctgagtgcatttccctgaataacttcaataaattcttctaattgggcctttttgacattttctttggccttttctattactttactatctagatcaagcgctgtaatgtgacaggaaaatgctttagcgatatcgatggaactggtacattgattacaagctacttctagaacacgactgtcagcactaaagtgtccttttttgataagccaattcgttgcttggacacctcctggtcttaagcgttttttcctagtcgtgctaagaattgatgtccaatttctttatgtggcaataagatcacctctttcttttaatagtaatatcattttttcttaattataacacatagatgctaagataacaaggagtaatagtgattgaatggtataagtgatgaattttagagagcgttttcttttaactaggggtgtgatgccaaaactagaatggcatagagaaccatacatctcaaaaggtcttccttagataaaactagttgtttttatatctgtcagaaaaatcataatttatttttgatataatgattttttgagtatttaatttatatgttataatgaaaaaaactaaaaaagaggaatatcatgtcatacgaacaagaatttttaaaagactttgaagagtggttacaatcgcaaataagtatcaaccaaatggcaatggacagtgcaaagaaagttttagaggaagataaggatgagcgagcagcagatgcgtatattcgttatgagagtaagttagacgcttatcgctttttgcaagggaaatttaataactatcataaccaaaaatctttccatgatttgcctgatggtctttttggacaacgtcattattaaaaggtttatcgctagaaagcttgtcaaataggcatttctatgatacattgttatagtagtttttagatactatgatagatttcataaatgaggagaaagcattatacaatggcaaagcgtattaaaccgaataaaaaaagagagcttttgaaagctaaagggatcaattggaaggatgttcgactatctcaaactttacaagaagtcgcattaccgaaaaagacggctcctgaagcgccaaaggcagtcgatcttttagaaggtttaactgctaataaacaagatgttttaaaagaagctggccttgtcagccttgaagcatttgcgaaagtaagtgaagcagatgttttagcactaaaaggtattggtccagcagctattaaacagttagttgataatggtgttgtttttgcaaaataatttgatttaccttgcgaaagtagccttattttgctagaataaattaacttagaggtgttttgaaatcccatttgtcacaggaagcggtcatactgagaaatccgcacaaatgtcaaagcttgttgctaagtccaataattgaaacaaaacgagttgcggatgttatcatccgaatttgggtggtaccgcggaaatcgtaacacgaaattcgtccctgtcagaattgacagggattttttgtatttaggagtgaggagattgaagtatatgcagattctagaagatttcgatggcaaagcattaccaaaactagaaacggatcggcttatcttgcgtcagcgaacggtgggggatgtcccagccatgtttgattacgtttgcttggaagaggttgcctatccagcaggactcagcccaatagcttctttagaagatgagtacgattattttgaaaatcgctactatcaaaatctggaaaaggcaaaattaccatctggttatggtattaccgttaaaggaagtgatcgtattatcggatcctgcgcctttaaccatcgccatgaagacgatgttttcgagatttgctatctgcttcatcctgactactggggtcatggctatatgacagaagctgtcgccgctttgattgaagtcggttttacccttctcaatctccacaaaatcgaaatccgctgctatgattacaataagcaaagccggcgcgtggcagaaaaactaggattcacccttgaagctaccattcgtgatcgtaaggataatcaagacaatcgctgtgtcaatttgatatatggtttgctgaggagtgagtgggagtaattattctactcttcatagaagttactagatcgactaatttggctgtgcagggcacttaactaagtcatcaataatatcgtagatatggaggagacaaatgattaagatacttggagaaatcgtagataaccagctacctgttgtggaaacgaatcgtctgttgttgcgtcaacgcaagttagaagatgctaaggagatatttgaatttgtcaaacttgatgaggtgagttatccagcaggttttccggctgttaaaagcttggaagaagagataacctatattcaagagatttatccaactaatcttgaaaaagaaaagttaccctctggttatgctattactctaaaaggcgatgataaggtaattggttcagtagattttaaccatcgccacgaagatgacatttttgaaattggctacctgctccaccctgattattggggacaaggcattgtgccagaagcagcttcagcccttgtggagataggtttcacactgctaggactacataagattgagctgggatgctatgactataataagcaaagtcaggcggttgcgcgcaaattaggttttactttagaggctaatattcgtgatcgaagagatgcccaggggaaacgttgtggcgatatgcgctttggtttactgcgaagcgagtgggagaaaaaaagaagatgaatattattatcatcggagcacaagcttctgggaaaatgacaattggtcaggaaatcgcaaaacagacaggcatgaccttattccataaccatgattctatagattttgttttacgcttcatgccatggtctccagatagtattgctctaacggagtctattcgctttaaattttttgaaacgtttgctaagactggtcaagaaatgatttttactattgtaattgatttcaatgattcaagagatgtagtatttctagaaaagattcaaatagtttttcaatctcacaaccaagaggtattatttgtagaattagaaacagagctaagtgagcgtctcaaacgaaatcgcacagaaaatcgcctcaagcataagccttcaaaacgtgatatcaaatggtcagagagcgatatttgttcaaccatggattacgctatctttaatcctgaagtagccccagaagcgcttacatattatcataaaatcaataatacttgcttaactgctactgaaacagcatatcttattattcaaaaaataaaccaaatcaaggagaaaaactaatgtcaaaagaactatcaccaaaatacaatcctgccgaggttgaggaaggccgttatcaaacttggcttgaccaagatgttttcaagccatcaggggatactgaggctaagccttattctatcgtaattccaccaccaaacgttacgggtaaattgcacttgggtcacgcttgggatacaactctacaagatatcattattcgtcaaaagcgtatgcagggctttgatacactctggcttccaggtatggaccacgctggtatagccactcaagctaaggttgaggagcgccttcgtgagcaaggcatttcacgttatgatcttggtcgtgaaaaattcctagataaagtttgggaatggaaagacgagtatgcagcaactattaaatctcagtggggaaaaatgggtctttcggttgattatagccgtgagcgttttacccttgatgagggactttcaaaagcggtaagaaaagtctttgttgatttgtacaataaaggttggatctatcgtggggagttcatcattaactgggatccagcagctcgcacagccctttcagatattgaagttattcacaaggatgttgagggtgctttctatcatatgaattatatgctggaagatggctcacgcgccctagaagtagcaacaactcgtcctgagactatgtttggagatgtggctgtagcggtaaatccagaagatgcacgttacaaggatttgattggtcaaaatgttatccttcctatcatcaataaacctattccaatcgtcgctgatgaacacgctgatccagaatttggaacaggtgtggttaagattacgccggctcacgaccctaatgactttgctgtaggtcaacgccacaacttaccacaagttaacgttatgaacgatgatggtactatgaatgaacttgcggatgaatttaatggtatggatcgtttcgaagctcgtaaggcagtagtcgctaaattagaatcgttaggaaacttagtaaaaattaaaaaaacgactcattctgttggtcattcagaacgaacaggcgttgtggttgaaccacgtttatctactcaatggttcgtcaagatggatcaattggctaagaatgccattgccaaccaagatacagaagacaaggtagagttttatccaccacgatttaacgatacttttatgagctggatggaaaatgtccatgactgggttatctctcgtcaattatggtggggacaccaaattcctgcatggtacaacgtcaatggtgagatgtatgttggagaagatgccccagagggtgacggatggacacaggatgaagacgttctagacacatggtttagttctgctttatggccgttttcaacaatgggatggccagacaccgaagcagctgacttcaaacgctacttcccaacgtcaaccttggtaactggatacgatatcatcttcttctgggtatcgcgcatgattttccaatcccttgaatttacaggacgccaaccattctcaaatgttcttattcatggactcatccgtgatgaagaaggacgtaaaatgtctaaatcactcggcaacgggattgatccgatggatgtcattgagaaatatggtgcggatgcccttcgttggttcctctcaaatggttcagcccctggtcaagatgtgcgtttttcatacgaaaaaatggatgcttcgtggaatttcattaataagatttggaacatttcacgctatatccttatgaataacgaaggtttaacgttggatcaagccagagaaaatgtggaaaaagttgttaatagtcaagttggaaatgtaacagaccgttggattctccacaatttaaatgagactgtgggtaaagttactgaaaactttgacaagtttgaatttggtgttgctggtcacatcctttacaactttatctgggaagaatttgctaattggtacgttgagttaacaaaagaggttctttatagtgacaatgaagacgagaaagtcatcactcgctctgttcttctttataccttagatcaaatcttgcgtcttcttcatccaatcatgccatttgtgacagaagaaatttttggacaatatgcagaaggatcaattgtccttgcaagttatccacaagttaacgcgacatttgaaaatcaaacagctcacaaaggcgttgaaagcttgaaagatttgattcgttcagtgcgaaatagcagagcagaggtcaatgttgctccatctaaaccaatcactatcttggttaagacaagtgacagcgaactcgaaagcttcttcaaagacaatagcaactacatcaaacgcttcacaaacccagagacgcttgaaatcagctcagcaattgccacaccagaacttgccatgtcatcagtcatcacaggtgcagaaattttcctcccacttgctgacctccttaacgttgaagaagagttggcacgacttgaaaaagaacttgctaaatggcaaaaagaactagatatggttggcaaaaaactcagcaacgagcgctttgtagctaacgctaaaccagaagtcgtccaaaaagaaaaagataaacagaccgactaccaaactaaatacgacgcaaccatagcacgtattgaagaaatgaagaagttggtgaggtaaaaaaataaaaaaacgctatcataaatgatggcgttttttgatataatttgattatggatctttagagataataagtagaaattgtgcagccttattatgtatagtcgctttaaactgtttgatgctagttcttatgctataataactctatcaatgtcaaaggagtttttatgtcaaaggtaaggtatggtgttgtgtcaacggcaaaggtggcgcctcgttttattgaaggagtccgcttagcaggaaatggtgaagttgtggctgtatcgagtcgaactcttgagtctgcgcaagcttttgccaacaaatatcatctcccaaaggcttacgataagttagaggatatgttagcagatgagtcaattgatgtgatttatgtggcaacaattaatcaagaccattataaagttgctaaagcagctctgttagcgggaaaacatgtgttggtagaaaagcctttcacattgacttacgaccaagcgaatgaattattcgctttggcagaaagttgtaatctgtttttgatggaggcacaaaaatcggtatttattccgatgacacaagtgattaaaaaattacttgcctctggtgaaataggagaagtgatctccatctcatctacaacagcctacccaaacattgaccatgtaacatggtttagagaacttgagttaggtggaggaacagtgcattttatggcgccctacgccctgtcttatttacaatatctatttgatgcgactataactcatgctagtgggactgcgacttttccaaaaggtcaaagcgatagtcaatccaaactactcttgcaattatcaaatggggtcctcgtagatatcttcttgacaacacgtctaaatttaccgcatgaaatgattatttatggaactgaaggtcgtctaatcattccacatttttggaaaaccactcatgcaaaattggtgagaaatgatactagtgcgcgaacgattcaagttgacatggttagtgattttgagaaagaagcttatcatgttagtcaaatgattttagaagggcaaagggtaagtcatatcatgacgcctcagttgacgctgtcaggtgttaagattatagaagacttataccgttcatgggggaaatgatgctggctatctagcatattaataaggagtactagatgttattttagtagtccttttttgttttgctctcataaggttaattagatttaaaagggttttctacttgttttttctcgatttttatttcataatgtagacaagtttagagtgaggtgcttctatgttttcgagcgattttggatttgagataattaatgttgacgacctatccttgcaagaggagagatttttaccttcagaattgctggcttatgcacgtgatgaaaatgagtcttctttcgtacgtgatattgaggggcatttggcacttgtttaccagcttttggatacgcaaggtcacgttgatgatgttcgtcatgtgccgagagtgataccagtgactctatttttgaaagaagatggcttgtttgtattagctaatcataaaaatattaaccttgtaaaaaaagcacttaatcgtgttgaaaaggtagattctccgaaacacctcttattatcattagtgactgctttctcaaagcaatattttgatgttttagatactatttctgaagaaagagataaactaatcaatgatttgcgtaaaagaccaaacaaatcgaacttggcaaggctggcaaatttacaaagtggaacagtacacttaatgatgggaactaagcaaaattttgaaatgctgaccgatttacaaaacattgagcaagataaagagaacactagaaatgaaaagatgcaacttcaagatgctattattgaagcaagacaattatctaacatgtgttccttaaattcacaggttttccaagaactttcttcttataataatgtcctcagcaataaccttaacgacaatgtaactactttaacaattatttccattggtatttccattattgctatggttaccagtttttatggaatgaatgttaagttgccttttgatagtgtggatgctgtctgggtattgattattttaattacgactatcattactattatgctctctattgttatgtacatttagagtctgtcaataatcttgtgtaaacactctagcaaagctgatattgttaatcaaataggctttcaagtgtgtccgtacattggccaaaacctttgtggattcgttgtccttgcttgaagttgtaatcactaaatagtgtgacgagatagcgttctagggattcttcattgggaaagacgactttctttttggtttgacgtttgatttctttgttaagtgattcaataaggttggtcgagtagatacttccccagatctgatgaggaaattcataaaagatcaatagattttcgattgattctaaggtctctattaccttcttgtagtgtggtttccactcattgataaagctatctaaggcttgctttgcttcctctacattgatcgcgcgataaattgttttaaactgctccaaaattagagcacgatctgctcgtttcaccttacttgcaatatttcggccaatatggacaaggcaacgctgttgtttggccattgggaaggcttgctggataagctgatcaagtccattaaaaccatcactcacaacaagagagacttgttgtacaccttgacccttaaatctttctagaaggtctgaccacgaagcattgttttcattgggtgcgatgtcatatccaaggatagccttatgcccatatgatgtgacgcctagtgcaatgtggatgcattccttactaactgtaccacgtctcagaggaaggtaagtcccatcaagatataatacggtatagttagcttctaaggaacgttcatgaaagctagccacgttttcctgtgtcgctttcgagatattagatactgttgctggactgtaatgatgaccatacatacgctcaatgatgtcgctgatttcacgtgttgtgactccagttcgataaagcttgataaccatttcttctaaatgattgtctcgacgaccgtaacttgggattaaggctggactgaactccccgtttcgatctctagggatcaacaaattaacaacaccatacttggtctcaaatcgacgtgtataagcaccattacgactattaccggtgttgtaacctgccttatcgtatggttcatagccaaggaaggcggatagctccacttggagaaggtcattcatggcagtttcaagagacgaacggaaaaattcatcaatatcttgtttttgagctaggaagttaagtaattctgtggtaaactgggtcatgggaataaatctctttctagtgaagtctcgcaactctactatacaggatttattcctttttgtgtttacacaagatattttacactacctacatttatgtccataaagaggataatcatcccaaacataaatagagaattaataagagggtactatcaattagtttagttttaagcatggtaacatgctttttttgtacgaagaaactttagcgcaaggcagaattcatctttgactttgagcttgctttctagctcttaaaacgacataatagaggataatgtacagtgaatagagaggttactatgtcaatagaatcagattttttccggaaaaaacgttttattttttcatcgcttgaggagtttggatttatcaaatctgaccaagagtatatctattgtcaaacatttatggataatgactttaaagctattatcacgatttcattggatggaaagatagctggtaaggttattgattcggcacttgaagaagaatatttaccgcttcgagcagcaaattataatggttcgtttgttggcgaagtacgatcggcttatatggctatattaggtgatatttcagattcttgttgtaaggacttattatttaccaaagatcaaagtaatcgtttagcggagaagatagctaaaacttttgaagattcagttgattatccatttgcgaagcacccacaatatgcttcctatcgtgtgtcaggtaaatggtatgctctgctttttccattgaagatggggaaactagaaaatgttccagctcaactgtcagaagatgaggttgaagttttgaatattaaagtcaatcctcaagatatggaaatacttttacaaaaagaaggtatttatccttcttatcatatgtctaaaaagacttgggtatctatcgttttagacaatactttgtctgatatagaaatttttaaattggtatcagatagtcgtaagcttgtttctcacaataaaaaatcaaattctgagccagagttttggattattcctgctaatcctaaattttacgatattgataaggagtttgcagagcatcaattgattgattggactcaaaaaggaaagattgcggtgggagattatgtgtttatttatattacagcacctattcgtgcttttcgctatgtctgtcaagtgatagaacgtgaccttaaaacaagtacttacttaggagcaagagatgtcaaagcttatatgcgactcaaactgataaggcaatttgaagattctacctatcctgtagcatttttagcagaacacggcgttaagactgtgagaggaccacggcgaatgaccaaggaattgcgacaagtcatggcaaaaacaattctagagtaatgactttcagaaaaaacttgtaaaaaagtcagaataattctacaattcctcttccattttgttacttgaaggagtataatagctctaacattttataatttaaggaggaacatatgaagaaaagctttattcatcagcaacaggagatttcttttgtcaaaaatacttttacacaatatttgattgataagttagaaatcgtcgaagtgcaaggacctattcttagtcaggtcggggatggtatgcaagataatttatctggtattgaacatcctgtatcggtgaaagtccttaatatacctgaagctgaatttgaagtcgttcactcattggctaaatggaaacgccatactttggcaagatttgggtttaatgagggagaaggtctttttgttcatatgaaagctcttcgtccagatgaagattctcttgatccaacacactcagtttacgtagatcagtgggactgggagaaggtcattcctgatggtagacgtaatttggactatctaaaagaaactgtggaaaaaatctacaaagctatccgcctaacagagcttgccgtggaagctcgttttgatattgaatccattttaccaaagcgtattacctttattcatacagaagaattggtagaaaaatacccagacttaagccctaaagagcgtgaaaatgccatcgctaaggagtatggcgcagtctttttgattggtattggtggagagttagcagatggtaaaccacatgatggtcgtgcaccggactatgatgactggacaacaccatcagaaaatggttttaaaggtctcaatggtgatattttagtgtggaacgaacagcttggaactgcctttgaactatcatcaatgggaattcgagttgatgaagatgctcttaaacgtcaagttgttctcaccggtgatgaagatcgtttagagtttgagtggcataagacgctattacgtggtttcttccctctgactattggtgggggaattggtcaatcacgattagctatgttcttgcttcgtaaaaaacatattggagaagtacagtcaagtgtctggccaaaagaagtcagagatacctttgaaaatatattataaaaaatcagccaagcagttttgtttggctgattttaacaataagtttatttttggcttaagaaagtttggatttgttgaggtgtagcttggcttccttgaacaagatatttagtcatttttccttgttgataatgtgctaaatttggaacagtggtaatatgatgctttttgaaaaaactcttcaatcgtttccctttgtatttttgactatcaaggtagtaaatttttgaatgaagtgtggcttgagattttaataattttggtaagaaagctctacaatattggcaagttggacgtcctataaaaatagtcgcttcagattgttgacttttgcttactaacgccttatctgtgatggcgattaagtcactatttgttatcatgtgttggtattgttgttgagaaatagtcatggtgtcagcgctacttaagtttgattttagcgttgtaaggcataatatggctattaaagttaataatagttttttaatcattatgggaacctcgtttctcttactgctagcttatcatatcaaaaaagaaggaaaagagatactatcttctctgtttgttataagcaattttttgataactctaccttattttttgttataatagtggttatgagagtagtagcaggaacatttggagggcgtcctttaaaaacgcttgatggaaaaacaactcgtccaacaactgataaggttaaaggcgctatttttaatatgattggtcctttttttgaaggtggtcgtgttttagaccttttttctggcagtggtagcttagctattgaggcgatctcaaggggaatggaccaagctgtcctagttgaaaaagataggcgtgcgcaggtcgttattcaagaaaatattgcaatgactaagagtccggagcaatttcaattattaaaaatggaagccaaccgtgctttagaacaattaacgggacaatttgatttggtcttgttggacccgccatatgctaaggaagaaattgtaaagcaaatccaaatcatggatagcaagggtttattaggcgatgatatcatgattgcttgtgaaacggacaaatcagttgatttacctgaagaaattgcttcttttgggatatggaaacagaaaatttatggcatttctaaagtaacggtctacgttcgttaggaggctttggtatggattacaagttagtgatgattattctcatcttagtcatattgatttatttgttgttgcgccttcactatttagaagagttgctaaaacattatcacttcaaaaatgatgaaggagtttgttcattatcaagaacaaaaaatccattgtatctattaatggcaatgattacttttttgccaaatcttatcaattggatagctaatggttttgaggcaatagacattgttcgcctgattcctgtggtagtctttttatggttgtattattgtggagatgacgacgaatgacaaagaaagctttatttacaggttcatttgatcctgttactaatggacatttagatattattgagcgcgccagctatctatttgatcatgtttacattgggttattttataaccttgagaagcaaggttacttttcgattgagtgccgtaaaaaaatgttagaagaagctatccgtcagtttaagaatgtttcagttttagtggcgcaagatagactggctgttgacttagcaagggaagtgggagcaaaatattttgttcgaggtctgcgtaatagccaggattttgattatgaagccaatttggagttttttaataaacagttggcagatgatattgagacagtttatttatcaacgtcgccatctttgagtccgatatcatctagtcgcatccgtgaattgatacattttaaggcttctgtgaagccttttgttccaaagagtgttgttagagaagtggagaaaatgagtgaagaatagagatccaaaaagaaaacataaaagtttactaggtctgcttaaatggtggattataggttttgcttttttattgttagtattagcaagccttgtagtgagactaccttattatttggaaatgccaggtggagcttatgatatccgttcggtattgaaagtgaataaaaaggctgataaagctaagggttcgtacaattttgtagcggtatctgtcagtcaagcaacgccagctcaggttctttatgcttggttaactccttttacagaattatctagtaaagaggagacaacaggtggctttagtaatgacgattatctcagaattaatcaattctacatggagacttctcaaaatgagtccatctatcaagctttaaagttagctaataagcaagtatctcttacttataaaggagtttatgtgcttaacttagctaaaaattcgacatttaaagatagattacatttagctgatacagtcacaggagttaatggcaaaagtttcaaaaattcttctcaacttatcaaatatgttgcagctcttcatctaggtgataaagtaaaggtacaatacacaagtcaaggtaaaaagaaagaatcagttggtaaagttattaaactatcaaacggtaaaaatggtattggtatcggtttgacagaccatacagaagtattatctgatgttcctgtggactttaatactgaaggtgttggaggaccaagtgcaggtttaatgtttactttagcgatttacgaccaattggttaaagaagatttacgtaaaggacgtaagattgcaggtactggtactattgagcaaaatgggcatgttggcgatattggtggagcaggtttgaaagttgtttcagcggctaaaaaaggaatggatattttctttgttcctaataatccgatcgataaaaatgctaaaaaaggcaaaacaaaggttcagacgaattatcaagaggcaaaagcagcagctaagcgattaggtacgaagatgaaaattgtaccagttcaaaatgttcagcaagctattgattatttgaaaaaaacaaaataaactcaaagagttcgggcgtctgctcggcttttttgttttgcgacatttgactatcaaagtgctaaaatgatagtatgacagagcttataagaatactacatttaaatgatctgcactctcattttgagaattttcctaaggtaaaacgattttttcatgacaatcaagcgcagccaatagagacgatttcacttgacttgggggataatattgataaaagccatcctttgacagaagcaagctcgggaaaggctaatgtccaattgatgaatgaactgggtattgagcttgctactattggtaataatgaaggagttggtttatccaaaaaagacttggaccaagtctacaaagattcagattttacggttattgttggcaatctaaaagataacataatcgaaccgagttgggcaaaaccttacattatttatgagacgcagcaaggaactaagcttgcctttttagcttatacttttccttattataaaacctatgaacctaatgggtggacgatagaagatccaattgactgtcttaaatgccatttacaaataaatgagataaaagaggcaaattgtcgcattttgatgagtcatttaggtattcgttttgatacaaggattgctcaagaattttcagaaattgaccttattataggtgcacatacacaccatttatttgaggaaggggagctaattaacggtacatatcttgcagcagctggtaaatatggtcgctttgttgggagtattgatataacttttgataatcatacactaaaagatattttaatctcaacatgtgatacaaaacaactaactggttatccttcggacagtgactggctaagaagattgagtcagaaggtaaagaacagcttagaaaagaaagtttaatatcctttccagcaccattatcattagaagaatcgtaccaactagtcatggatgcgatgctgttttacgcaggtgcagatgttgctattatcaattctggcttaattgttcagccatttgaaaaagacttttcgaggaaaaatctccacgaatcattacctcatcaaatgcgcctcgctaaattgacagtgagtagtcaagaacttttagagatttatgaaactatttatcaacaaggtcaatttttagcgcaacaaaagattcatggtatgggctttcgtggcaagtgctttggagaagttttacattcgggatttgattacaaaaatggaaaaatagtgtataatgagaaagatattgatgccaaagaagaagtgattcttgtaatcgttgatcagtattattttgcatcgtattttgagtgtttaaaaacgaaaaaagtagacttgcttttcctgaattactcagagatgtggcagcagattatttaataaatatgacactataaatgaaaaatagataaataaagagtagaagctagtcgtttctctcaatgattttagagaaaggagtattatgcgaaaagaagtgacaccagagatgcttaactataataagtatcctggcccacagttcattcactttgaaaatatcgttaaaagtgatgatattgaatttcaacttgttattaatgaaaaatcagcttttgatgtgactgtctttggacaacgtttttctgagattttattaaaatatgattttatcgttggcgattggggtaacgagcagttgaggctaagaggcttttacaaagatgctagtacaattagaaaaaatagccggatttcacgtttagaagattatattaaagagtattgtaactttggttgtgcttattttgtgttggagaatccaaatcctagagatattaaatttgatgatgaaagacctcataagcgtcgtaagtcaagatccaaatcacaatcatcaaagtcacaaactagaaataatcgttcccagtcaaatgccaatgctcattttacaagtaaaaagcgtaaagacacaaaacgccgtcaagaacgtcatattaaagaagagcaagataaggaaatgacctctgcaaagcagcattttgttattcgtaagaaaaaataagaaagggataaactgtaaccgtttattccaccatgaagaaagaaaatattatgcctaaaaaaactgatacacccgcctataaaccctctatttatagcttaactcgcgatgaactaatagcttgggctattgaacatggagaaaagaaattccgtgcttcacaaatctgggactggctctataaaaagcgtgtgcaaagcttcgatgaaatgactaacatttccaaagattttattgcacttttgaacgagaattttgttgttaatcctctaaaacaacgtattgttcaagaatctgctgatggaactgttaaatacctttttgaattacctgatggcatgctgattgagacggttttgatgcgtcaacattatggtttatcagtatgtgtaacgactcaagttggttgtaacattggttgcactttctgtgcaagtggtttaataaagaaacaacgtgatcttaacaatggcgaaatcactgctcaaattatgcttgttcaaaaatattttgatgaacgtggacaaggtgagcgcgttagtcacattgtggtcatgggaataggtgaaccctttgataactataccaatgtattaaaattcttgcgtacagttaatgatgataatggattagctattggtgcacgtcacattacagtgtctacttcaggtttagcacataaaattcgtgaatttgcaaatgaaggtgtacaagttaacttagcagtatctcttcatgctccaaataacgatttacgatcaagtatcatgcgtattaatcgttctttccctcttgaaaagttgtttgcggctattgaatattatattgagacgactaaccgtcgtgtaacatttgagtatattatgttaaatggtgtcaacgataccccagaaaatgctcaagagttagcagatttaacgaaaaagattcgcaaattatcttatgtcaatttaattccttacaatcctgtctcagaacatgaccagtatagtcgtagtcctaaagagcgtgtagaagctttctatgacgttttgaagaaaaatggagttaactgtgttgttcgtcaagaacatggtacggacattgatgcagcttgcgggcaattacgttcaaacacaatgaaacgcgatcgtcaaaaagcgaaggtagggcagtaatgcttaaaagattacttactgaagatggggaattgacaaagattagtcgtcgtttcgtttggatgttagtgattatctattgtcttattattgtcaggatgtgttttgggcctcaaattatgattgagggggtatcaactccgaatgttcagcgcttcggaagaattgtagctcttttagtaccatttaattcttttcgtagtttagatcagctaactagctttaaagagattttttgggttattggtcaaaatgtagtgaatattttactgctgtttcctctcattatagggttactatccctaaagccaagtttacggaaatataaaagcgttatattacttgctttcttgatgtctattttcatagagtgtactcaagttgttttagatattttaatagatgctaatcgggtttttgaaatcgacgatctatggacaaataccttaggcggtcctttcgccctatggacttatcgaaacataaaaggttggcttctaactattagaaaatgaaaataatgtaaaggctatgatattgttcaagccttttactatttaaaaagaatcactttagttgacgaaagtaagcttatagaggcataatagagagttgttaaatgagaattttaaaacacttttcatgtcttctgacttaattatgatgtttttcaatctttgagaaaggaaaaatatgtctattataaaaaatttgtggtggttttttaaggaagaaaagaagcgctatcttattggaattttgtcattaagtttggttgcggtgttaaatcttatccctcctaaaatcatgggatcagttattgatgctattacaactggaaaattaacaagaccacaattgctctggaatttattaggtttggttttgtcagctttagctatgtatgggctgcgttatatttggcgtatgtatattttagggacttcttacaaattgggtcaagttgtcagataccgtttatttgaacattttacaaaaatgtctccttctttttatcagaaatatcgtacaggtgatttaatggcgcacgcgaccaacgacatcaattctctaacacgtcttgcaggaggaggagttatgtcagcagtggatgcctctatcacagcattagtaacgcttatcaccatgttctttactatttcgtggcaaatgacattaattgcggttatccctttgcccttaatggccttagcaactagtaaattggggcgaaaaacccatgaaaccttcaaagaatctcaggcagccttttcagaattaaataataaagtgcaagaaagtgtctctggcgtcaaagtgactaaatcatttggttatcaagaacaagaaattgcttcttttcaagaggttaatcagatgactttcgtgaagaacatgcggaccatgacttatgatgtcatgtttgatcctttagttcttctttttataggtgcctcctacgtattaacattggctatgggagcttttatgatttcaaaaggtcaagttactgttggtgacttggtaacatttgtgacgtatttagatatgttggtatggcccttgatggcgattggtttcttgttcaatatggtacagcgtggtagtgtttcttataaccgtattaatagcctacttgagcaagaatcggatataactgaccctttaaatcctatcagacctgttgtcaatggaacattaagatatgatattgatttctttagatacgacaatgaagaaaccttagccgatattcatttcaccttagaaaaaggtcaaaccttaggtttggtaggtcaaacgggatcagggaagacaagtcttattaagttattgctacgtgaacatgatgtgactcagggaaaaattactttaaataaacatgatatacgtgattatcgattgtctgagttacgtcaactaatcggttatgttcctcaagatcagtttttatttgctaccagtattttagaaaatgttcgctttggaaatccaactctatctatcaatgctgttaaaaaagcaactaaattggctcatgtttacgatgacattaaacagatgccagcaggatttgagactctaattggagaaaaaggagtctcattatctggtggacaaaaacaaaggattgcgatgagtcgtgccatgattttagatccagatattcttattttggatgattctctatcagcagtggacgctaaaacggaacatgccattattgaaaatcttaaaacgaatcgtcaagggaaatcgactattatttcagcacatcgattatcagctgttgtgcacgcagaccttatcttagttatgcaagacggcagagtcatcgagcgaggtcagcatcaagagttgctaaataaaggtggttggtatgctgaaacgtatgcctcacagcaattagaaatggaggaagcatttgatgaagtctaatcaatggcaagtctttaagagattaatctcctatttacgcccttataaatggtttacagtattagctctatctctcttattgttgacgactgttgttaaaaatattattcctttaattgcttcacattttattgatcactatctgacaaatgttaatcaaacagcagttcttattttagtgggatattattcaatgtatgtcttgcagaccttaattcaatattttgggaatctcttttttgcgcgtgtttcttatagtattgttagagatattcgtagagatgcttttgctaatatggaaaggcttggcatgtcttattttgataggacaccggcaggatctatagtgtcacgtattactaatgatactgaagcaatatctgatatgttttcgggtattttatcgagttttatctcggcgatatttatttttacagttactctgtacactatgttgatgctagacattaaactaacaggacttgtcgctcttttattacctgttatctttatattagtgaatgtctatcggaaaaaatcagtcactgtcattgctaaaacgagaagtttacttagtgatatcaacagtaaattatcagaaagtattgaaggaattcgcattgtacaggcttttggtcaagaagagcgcttgaagactgaatttgaggaaattaacaaagagcatgttgtgtatgccaatcgttctatggctcttgatagtctcttcttaagaccggcgatgtctcttttaaaactcctagcatatgctgttcttatggcttattttggatttacaggagttaaaggaggtcttacggcaggattgatgtatgcttttattcagtacgttaatcgtctctttgaccctttaattgaagtaacgcaaaatttttcaaccttacaaacatcaatggtatcagcagggcgtgtgtttgatttgattgatgaaacaggttttgaaccaagccaaaaaaatacagaagcttttgtgagagaaggaaatatcgaatttaaaaatgtatcattctcatatgatggaaaaaaacaaatccttgataatgtttcttttagtgttaaaaaaggtgaaacgattgcttttgtaggagcgacaggttctggaaaatcatctattattaatgtctttatgaggttttacgaatttcaatctggacaagttttattagatgggaaggatattagggattactcacaagaacaattgcgaaagaatattggactcgtcttacaagacccctttttatatcatggcactattaaatctaatatcaaaatgtaccaagacatcaccgatcaagaggtacaggacgcagcagagtttgttgatgctgatcaatttattcagaagttgccagataagtacgatgcagctgtttcagaacgtgggtcaagtttttcgactggacaacgccaactattggcgtttgccagaactgtggctagtaaacctaaaattttaatcttagatgaagcgacagcaaatattgattcggaaacagagcagattgtacaagattcgttagcaaaaatgcgtcaaggtcgaacaacaattgccattgctcaccgcttatcaaccattcaagatgctaattgtatctatgttcttgatagaggaaagataattgaaagtgggaatcacgagtctttattagacctaaaagggacttattatcgtatgtaccaattacaagctggcatgatggaggtctagaaaatttagactattcaaaaggcataatctgtgaggtttagaggttggagtagttattcctctaagccttttttatattttacaattagtgtataatgaggtcaaagtgcaaggaaaggtctataaaatgttactattggtagataattacgattcttttacctataatttaaagcaatatttaagtgtctataaagaggtattcgtcataaaaaatgatgttcctaacctttttttattagctgagagcgcagaagccatcgtcttatcacctggaccaggacacccaaaggatgctgggaaaatggtagaattaatcaatcagtttataggaaagaaacctattctaggtatctgtttggggcatcaagcgcttgccgagtgcttgggtgggcgattaaatttagcaaatcacgttatgcatggtaaacaaagttgggtaacaataaacgaccatactagtttgtttaagggaattgatagtccaacccaagttatgcgttatcattcattggtagtgactgatttaccagagaatattgctgttattgcacgatcaaatgaggataatgaaatcatggcattccattgccccagcttaaaggtatatgcgatgcagtttcatcctgagtcaatcgggagtattgatggaatgaaaatgattgaaaactttttgacgttaattaatgactaaaatgtgttagtgtaggataatgactctctataaataaaagacagtaccttaggtactgtcttttatttagttgtatagatgagttaatctgtttgcaaatttacgataaataatcaagcaaatggatgcttttaaggtatccccaggaataaaaataaggttagaaaatagtgatttagttaagggtagagaagtttgaaaggaaagaacgatgctaccacaaatatcaatcaatagtacgccaaatatccaaataataaggaattgaacccagagttttgttgttttcactttctcaagccctaggccgataaaaaaagctgcaaatggataagtcagcagatagcctgctgttggcccaaacagcgttacgagacctgaccgtcctcctggtaaaaatggtgcaccaatagcaactaagagcaagaaaatagccacagctaggaaacccttcctactaccaagcagagcacctgccagcataacaccaagattttgtaaaacaattgggactggaatgaaacctaatgggatccctgggataaaacctaaaacaataagtagtgcaaccatgagtgcaatataggtagttgttcttgttttcatttaaattaattcctttttagtatgatttagttgtaatttttccaagaattcaatatcggtatgttgattgcgaccgccctctgttaggtaatttcccaaaaaagttgagtcaacaagtaaggtgactaatgattcaaaattctcaaaatggacctctcgtccagcgcttaatcttaattccttgaaaggaaaaacaaaacgcaacatggccataatttttaagcatttaatgggagtcaaatagttatattttccaagaggtgttccttcaacagcaagtaaaaaattgacagggatagaataggggtccagctcttttagtctgaaagctaatgtgatgagcccctcatcgctctctcccataccacaaatgaatccagaacaaacatcaatgtcttcattgtgaattctttctaaagtatcacaacgatctttgaagctatgcgtcgttgcaatgttggggtagttttcttcgggggtgttgagattatgattgatacggtcaattcctgcttgttttagctgatgaagttgttctctatccaaaaaaccagcggtaaggcatatttctagagggaggctttttttgatttcagggatgacttgacataactgctcaatttctctcttgctaggcttagttccactcatcgcaatacaaaagacgctagcaccattttgatgagcgacaatagcctgttttagaatgacattttgaggaagcagaccaaatttatcaatgtcagcagtgctttctttagattgagaacagtaaccacaattttctgcacaaagtccttgcttagcacttaataaaacgttaaggcgaatattatttcggctaacttgatttttaaggtataaggcagcagcgtagatttcccaccagttctcatcgctatttagaatttccagcgcttgttcataagaaatgctagtctttccagataatatttcgtcagccaaatggatataatttgtttgaaatgacatgatagcctcctttaacgaaattaataatagcataaaaaaactatattgtaaacttagtcgatgtcataagttaacaatataaaaattatgatatactggtcttatattttgacgggagataagatgaaaaaactatttaaaaaagcgatagctatgtgccgagatttgccgcttaattttgtaattgttgaacttagtttgtatcaaagagaggatggctcatctgataatattaaatggatttctaagagaattcttgaggtaacggtaactgatcagcaatggatttaccatttgaggatgcttaatttaccaaaacttaagccaatgtcactagcatccagtgactgtcctgcaagggaagagaaggctagtcttatttcaatagaagaatgtcaaaaattcactagcttagtgcgagataaaaatccttttcaccaaggggaagcagctattgtgcctgcggctctattattggaaaaaataatggaagttagaaaaggaaaaataaaggagattcatttgacttttttatctccagtaagggtgaatcaagaattctcagtgcaagtagtggataacacagtgattatttttcagcatcaaatattatggtgaggggaacatatgaagaatagagatgtttatattggttttgggctacgaacacctatcggtataaaagggaagcaatttaaacattaccgtccagaacttttaggagcacaccttttaaatcaaataaaaaaaatagaatcagaatctaacattgatagtattatttgtgggaacacagttggtactgggggcaatattggtcgtttgatgactcttttttctgattatgaatcctatattccagtacaaacgattgatatgcagtgtgcttcatcaagttctgccttgttttttggttatctaaaaatcagtaccggtattaatgaaaaagttcttgttggggggattgaaagtagttctcttcaacctatgagacgttatgctaaagaagataatcgtaacggagaatatacagttgctcagttttctcctgactcttatgctgaaactgtaatgttagaaggggcccagagagtctgtcaaaaatatggttttagaagagaaatgttagataaattggcattcttgagccataaacgcgccttaacagctaaacaaggtggctatttagaagaggtaatcttaccaatggaagggatgcgagatcaaggcgttagaaaactaaaagaaacattttttcaaaaattaccaagattgatggaaaattcacctttgctcactattggaaatgtttgtttaatgcacgatgctgctgcatttctaacgcttcagagtcagaaaacagaattccggattgttcacattgtagaagtagcaggagatcccaagcttagtccagaattggttcacacggctacggaaaaactattaacagaaactcatactaaaatatcggattatgatgcaattgaatggaatgaaccatttgcagcgattgatgctctatttaatcattattatcctgaagagagagaaaaattcaatatttttggagggacattagcttacggacacccttatgcctgctcaggaattattaatatccttcatcttatgcaggcattaaaatataaaaataaacctatgggtctaactgccattgcaggggcaggaggagtcggaatggccatatcaatagagtacttaggagttaagaatgcttgaatcattgaaaacgatagttaaaaccaatagcgataaaaagttatttgatggtgatttacaggtcagttatggagaattttataacttagtaagacaagatatggcgtcacaagacaataggaaacatgtgattagcacacactctctgcttaaccaattagtaagatttgtttcaaagttatgtcaaaaagctcttcctattatttgtaaacctaaccttactcataatgaaataagtcgattagaaaaagaagtgcagtatgctcctcaactagctgattttggtgttctttcttctgggactacagctgatgctaaactattgtggaggagcttcacttcgtggtctgatttttttagcattcagaatgcttatttttcggtcacttccaatagcaaactgtttattcaaggtgatttttcatttactggtaacttaaatttagcgctatcccttttattactggggggaacacttgttgtcacacagaaaaattctgtaaaatactggcagactttatgggaaaaaactggtgtaacgcatctatatctgctccctagttatctcaagttagtggaacaatatagcaaggagactgcgttagacaataaaactattattacctcttcgcaatatgtctctgactcattactggaaggtttatatagaaagcatcctaaagtgtcagtgaaaatcttctatggtgctagtgagctcaattatgtgtcatggtacgatggtcgtgatatccgagataagccacagtatgttggagaaatcgttccaaatgtagctgttaggattaaagagggaagaatttttgtaaaaacaccgtatagtatctgtggcctttcaagtgaatattgtgctggtgattatggtgaactgatagatggcaaattatatctatttggccgtggtggtgattggtgcaatcaatcgggcattaagctctatttacctagattaatcgaaaaaataaaaacatgcccttatatcaaggatgcagtagcatttacaaaagagagtcaaagtcatggacaagagtcacattgctgtattgttttaattgaaaatcagatgcaacaagagtgtttgaagtggttatcggaacattttgaaaagaagtatgggtttaagcattatcatattgtatctaaaattcctttgatgccatctggaaaaattgattatcaacaactcaaaagacagttagcatgagcttttactaaaaaaataaaatagggttaatggattgtaaacctcagttctgatattctttattttgaaagatatcgtgatataatgataaaaaagaaagataaggaataaaatgttatcaaaagcaaaatcacgatatattatccgtgagattattaagttatttccagatgctaaacctagcttagactttactaatgtctttgagcttttggtagctgtaatgctatcagctcaaacaactgatgcagctgttaataaagttacacccgccctttttgaacgctttccaaatcctttagttttggcacaagctgatcccaaagagattgaaccctatatttctaaaattgggctttaccgtaataaagctcgattcttaaatcaatgcgctaaacaattgatagagcattttgatggaaaagtcccccgaactcgtcaagagctagaaagtttggctggcgttggaaggaaaacggctaacgtggtcatgagtgttggatttggtattccggcttttgccgtagatactcatgtcactcggatttgtaaacaccaccagatttgcaaacagtcggcttctccactggaaattgagaaacgagtcatggaggttttaccaccagaagagtggctagctgcacatcaatccatgatttattttggtcgtgcaatttgtcatcctaaaaatccaaaatgcgaccagtacccacaactttatcactttcctgataatttaaagtgattagaataaaagagagtaactggtgacgattatataagcgatacttaaaaacggtagaaaagctatcgtttttttcatttttctcataactaaacaataaataattcctaaccaagcacctatttgaataataaaaagcatttgatgaagaggtaaagataagccaattgtggctaaataaaggaaatctccacttccgatattaatatcaaccacttcagctaaaatcccaaataaacacaaaacaatagaaacttttgtaatcggtgtgagaattatcgttgaaatggtgaataatatccatagaaaaataggatactcttggtattttatatcataataacttaagataaaactcatgcataaagaaataaaatagatggtagacataatcataaaatcctttttatagtttatatttatattcgaaaaatggtagaaaagagattacgatttctattatagatagtcagtctaacgtcataatgacaattagcaagcggttgcggattttcttgaaaattgaatggttttctgttaaaattcatatatgaaagttttattcgatgtgcagaatcttttgaaaaaatttggtatttatgtttatattggtaaacgtctttatgatatcgaagttatgaagattgaattgcaacgtctctacgataatggtctgataagtagagatgattatttaaaagcagaactgattttaagaagagagcacagactagaattggagaaggaaaataaaaaatgagtaagaaattattgggaattgacctcggaggaacgaccattaaatttggtatcttgacgcttgagggagaagtacaagaaaaatgggcaattgagaccaatactttagaaaacggaagacatatcgtttctgatatcgttgaatctctcaaacatcgtttgagcctctatggattaacaaaagatgactttctcggtatcggtatgggttctccaggagctgttgatagaactagtaaaacagtaacaggtgcttttaatctaaattgggctgatactcaagaagtaggttcagttattgaaaaagaagttggaattccattttttattgataacgatgctaatgttgcagcacttggtgaacgctgggtaggtgctggtgccaataatcccgacgttgttttcgtaaccctcggaacaggagtaggtggaggtgttatcgcagatggtaacctcatccatggtgttgcaggagcaggtggagaaattgggcatatgattgttgatccagaaaatggatttacgtgcacatgtggtaacaaaggctgccttgagacagttgcatcagcgacaggtgttgttagagtagcacgtcaactcgcagaacaatatgagggttcgtctgccattaaagcagcgattgacaacggtgatactgttacaagtaaagatatttttatagcagcagaagatggggataaatttgctaattctgttgttgaacgtgtatcacgttaccttggactggcagcagctaatatttcaaatattttaaaccctgattctgtggttattggtggcggtgtctcagcagcaggtgaatttttacgtagtcgcgttgagaaatactttgtcacatttgctttcccacaagttaaaaagtcaactaaaattaagattgctgaactaggtaatgatgctggtattattggtgcagcaagcttagccaatcaacaagcaagttaaggagataaggtatggatatgtctgttattttaattattgttattcttctggcttttgttgcttgggcatcttggaattattggagggttcgtagggcagctaaatttttagataacgagtcttttcaaaaagaaatgtcacgaggacagttaattgatatccgagaagctggtgcttttcatagaaagcatattctcggagcacgtaacattccagcaagtcaatttaaagttgccttatcggctttgcgcaaagataaacctgtcctcttatatgacgcaagccgtggtcaatctattccaaggattgttttgttactcagaaaagaaggttttaatcaactttacgtgttaaaggacggtttcaattactggacgggtagagttaagtaatatactaaggagagagttactattaataactctcttcactttttgtagaaatgaattaaattgaaaaaagtagaaaataaatggcataaataatgaaatgatgaaaagttttcttatcacaaataggcagttaatatgaaaacatttacacttgtgtaaattctgttttttaagaaaaattgtgttataattcataagttaacagaattacattataaaatagaggaaaacatgacaaatttaagaacagatatccgtaacgttgcgatcattgcccacgttgaccacggtaaaacaactctcgttgatgaattattaaaacaatcacatactcttgatgagcgtaaagagcttgaagaacgtgcaatggattcaaatgatatcgaaaaagaacgtggtatcaccattcttgcaaaaaatacagccgtagcatacaacgatgttcgtatcaatattatggacacacctggtcacgcggactttggtggtgaagttgagcgtattatgaaaatggttgatggtgttgttttagtcgttgatgcctacgaaggaacaatgccacaaacacgttttgttttgaagaaagctcttgaacaaaacttaattccaatcgttgttgtaaataaaattgataagccgtcagctcgtccatcagaggttgttgatgaagttcttgaactatttattgagctcggtgctgatgatgatcaactagatttccctgttgtttatgcttcagctatcaatggaacatcttcaatgtcagatgatccttcagatcaagaaaaaacaatggcaccgatttttgatactatcattgatcacattccagccccagttgacaactcggaagaaccacttcaattccaagtttctcttcttgattacaatgattttgtaggacgtattggtattggacgtgttttccgcgggactgtcaaagttggagatcaagttactctttcaaaacttgatggtacaactaaaaacttccgcgtaacaaaactttttggtttctttggacttgaacgtaaagaaatccaagaggctaaagcgggtgatttaatcgctgtttctggtatggaagatatcttcgttggtgagacagtaactccgacagatgctattgaaccactaccagttttacgtattgacgagccaacacttcaaatgactttcttggtgaataattcaccatttgcaggtcgcgaaggtaaatggattacgtcacgtaaggttgaagaacgtcttttagcagaattacaaacagacgtttctttacgtgttgacccaacagattcgccagataaatggacggtttcagggcgtggagaattacatttatctatccttattgaaacaatgcgtcgtgagggatatgaacttcaagtatcacgtccagaagttatcatcaaagaaattgatggtgttcaatgcgagccgtttgagcgtgttcaaattgatactccagaagaatatcagggtgctattatccaaagtttgtcagagcgtaaaggtgatatgcttgatatgcagatggttggtaatggtcaaacgcgtttgattttcttgattcctgcacgtggtttgattggttattcaacagagtttctttcaatgacacgtggatatggtatcatgaatcatacttttgaccagtatctaccggttgttcaaggagaaattggtggtcgtcatcgtggtgccttggtttctattgaaaatggtaaagcaactacatattcaattatgcgtattgaagaacgtgggactatctttgtaaatccaggtatagaagtttatgaaggaatgattgttggtgagaattctcgtgataatgacctcggagtcaatattacaactgctaaacaaatgacaaatgtccgttcagcaactaaagatcaaactgcagtcatcaagacgcctcgtatccttactttagaagagtcacttgaatttttagcagatgatgagtacatggaagtaactcctgagtctattcgtcttcgtaaacaaattttaaataaagcagcacgtgacaaagctaataaaaagaaaaaatcagctgaataatatccaaagtatttcttatttatgattaataagaaaggagttctatgttttacttaattgttgcccttttgattgccttgtattacttttttatggcaccaaaaacagtacgtaatactttgaacgctattggtttagtaggtttggtagccttattacttgtcttggcagttatgagttttattaaaatccttcaattgccaggtgaattgtatattgggcttataatgattcctctaggatatacagcatttaaagaaacattgaatttgtcagaaaagaagaaatagcttatgaacttaggattttgtctcctaagttcttttgttttgagaaattagagacatatcctttaccttgaaaaagccactgattaaaggtaaaataatagggataataatgatagaatgggacgagtaatgaaaacaataacaacatttgaaaataaaaaagttttagtccttggtttagcacgatctggagaagctgctgcacgtttgttagctaagttaggagcaatagtgacagttaatgatggcaaaccatttgatgaaaatccaacagcacagtctttgttggaagagggtattaaagtggtttgtggtagtcatcctttagaattgttagatgaggatttttgttacatgattaaaaatccaggaataccttataacaatcctatggtcaaaaaagcattagaaaaacaaatccctgttttgactgaagtggaattagcatacttagtttcagaatctcagctaataggtattacaggctctaacgggaaaacgacaacgacaacgatgattgcagaagtcttaaatgctggaggtcagagaggtttgttagctgggaatatcggctttcctgctagtgaagttgttcaggctgcgaatgataaagatactctagttatggaattatcaagttttcagctaatgggagttaaggaatttcgtcctcatattgcagtaattactaatttaatgccaactcatttagattatcatgggtcttttgaagattatgttgctgcaaaatggaatatccaaaatcaaatgtcttcatctgattttttggtacttaattttaatcaaggtatttctaaagagttagctaaaactactaaagcaacaatcgttcctttctctactacggaaaaagttgatggtgcttacgtacaagacaagcaacttttctataaaggggagaatattatgtcagtagatgacattggtgtcccaggaagccataacgtagagaatgctctagcaactattgcggttgctaaactggctggtatcagtaatcaagttattagagaaactttaagcaattttggaggtgttaaacaccgcttgcaatcactcggtaaggttcatggtattagtttctataacgacagcaagtcaactaatatattggcaactcaaaaagcattatctggctttgataatactaaagttatcctaattgcaggaggtcttgatcgcggtaatgagtttgatgaattgataccagatatcactggacttaaacatatggttgttttaggggaatcggcatctcgagtaaaacgtgctgcacaaaaagcaggagtaacttatagcgatgctttagatgttagagatgcggtacataaagcttatgaggtggcacaacagggcgatgttatcttgctaagtcctgcaaatgcatcatgggacatgtataagaatttcgaagtccgtggtgatgaattcattgatactttcgaaagtcttagaggagagtaactatggggaaaaaaattgtttttacaggtggtggtacggtaggtcatgtaacactaaacctaatattaatccccaaatttatcaaagatggttgggaagtacattatattggtgataaaaatggcatagaacatgaacaaattaatcagtctggacttgatatcacatttcactctatagctactgggaaactacgtcgctatttttcatggcaaaatatgttagatgtctttaaagtaggggttggcgttcttcaatcgattgctattattgctaaacttagaccccaagccttattttcaaaagggggatttgtttcagtacctcctgtagtagctgcacgcctattaaaagttcctgtttttgttcatgaatcagatttatcaatggggttagcaaataagattgcttataaatttgcgactattatgtatacgacttttgaacaatctaaagatttaatcaaaactaagcatattggtgctgtaacaaaagtcatggattgtaaaaagtcgtttgaaaatactgacttaactagtataaaagaagccttcgatccaaacctaaagaccttactatttattggaggatcagcaggtgcaaaagtattcaatgattttattactcaaacacctgagctggaagaaaaatataatgttatcaatatttcaggcgattcttctctcaatcgattgaagaagaacctttatcgcgtggattatgttacagacctttatcagcctttaatgaatttagcagatgtggttgttacacgaggtggctctaatactatttttgaattagtagctatgaaaaaacttcatcttattatccctcttggacgtgaagcgagccgaggtgaccaattagagaatgctgcttattttgaagaaaagggctacgcattgcagttaccagaatctgaattaaacataaatacacttgagaaacagataaatttattaatttctaacagtgagagttacgaaaaaaacatgtcacaatcatctgaaataaaatctcaagatgaattttatcaattattaattgatgatatggcaaaagtaacaaaaggataaaacatgcctaagaagaaatcagataccccagaaaaagaagaagttgtcttaacggaatggcaaaagcgtaaccttgaatttttaaaaaaacgcaaagaagatgaagaagaacaaaaacgtattaacgaaaaattacgcttagataaaagaagtaaattaaatatttcttctcctgaagaacctcaaaatactactaaaattaagaagcttcattttccaaagatttcaagacctaagattgaaaagaaacagaaaaaagaaaaaatagtcaacagcttagccaaaactaatcgcattagaactgcacctatatttgtagtagcattcctagtcattttagtttccgttttcctactaactccttttagtaagcaaaaaacaataacagttagtggaaatcagcatacacctgatgatattttgatagagaaaacgaatattcaaaaaaacgattatttcttttctttaatttttaaacataaagctattgaacaacgtttagctgcagaagatgtatgggtaaaaacagctcagatgacttatcaatttcccaataagtttcatattcaagttcaagaaaataagattattgcatatgcacatacaaagcaaggatatcaacctgtcttggaaactggaaaaaaggctgatcctgtaaatagttcagagctaccaaagcacttcttaacaattaaccttgataaggaagatagtattaagctattaattaaagatttaaaggctttagaccctgatttaataagtgagattcaggtgataagtttagctgattctaaaacgacacctgacctcctgctgttagatatgcacgatggaaatagtattagaataccattatctaaatttaaagaaagacttcctttttacaaacaaattaagaagaaccttaaggaaccttctattgttgatatggaagtgggagtttacacaacaacaaataccattgaatcaacccctgttaaagcagaagatacaaaaaataaatcaactgataaaacacaaacacaaaatggtcaggttgcggaaaatagtcaaggacaaacaaataactcaaatactaatcaacaaggacaacagatagcaacagagcaggcacctaaccctcaaaatgttaattagcaataaaaaagactggatttatcagtcttttttatatatatcaagtcagtcatagattgctagtaaaaattgatttcttgaaaaaaatttaagtttgttataagttccgaatggtttaaataagttagaaatatttcaatttgatgttgcttaataaaaaaacgtaatttggtaacaattctgctttttttatggtataatattttctgaataattctgtttttggcagatgtagaatagaaaagaatggaaagatagcgaggtcgagtgaatggctagaaatggcttttttactggtttggatataggaacaagctcgattaaagttttagttgcagaatttattgcaaatgaaatgaatgtaattggggttagcaacgtccctagttccggtgtaaaagatggtataattattgatattgaggcagcagcaactgcaatcaaagaggcggtaaaacaagctgaggagaaagcaggcatcaccattgacaaaatcaatgttggattaccagcaaatcttctccaaattgaaccaactcaaggaatgattcctgttcctaatgaatcaaaagaaattaaggatgaagatgtcgaaagtgttgttaaatcagcattgactaaaagcattactcctgaaagagaagttatttcattgattccgcttgaattcattgtagatggtttccaagggattagagaccctagagggatgatggggattcgccttgagatgcgtggtcttatctatactggaccaacaactatccttcataatcttcgtaaaactgttgaacgagcaggtataaaagtagagcatgttgtgatcgcccctctagccttagcaaaatcagttctaaacgaaggtgaacgtgagtttggtgcaactgtgattgatatgggaggcggacaaacaacagtcgcttctatgcgtaatcaagaattgcaatatactaatatttattctgaaggtagcgattatgttaccaaagatatttctaaagtgctacgtacaacagtagaaatcgccgaagcattgaaattcaactttggacaagctaatgttgaagaagcaagtacttctgatacagttcaagttaatgttgttggtaacgaggaacctgttgaaattacagaaagctatctttcgcaaattatttcaggacgtattcgtcaaattttagaacatgtcaaacaagacttgggtagaggtcgtttacttgatttacctggtggtattattcttgttggaggtggtgcaattatgccaggagttgtcgaggttgctcaacaaatttttggaactagagttaaattgcacgttccaaaccaagtaggtattcgcaatccaatgtttgctaatgttattagtatcgttgattatgtaggaatgatgtcagaagttgacattatcgcacaacatgctgtaactggcgacgaaatgctaagacataaaccagtcgactttgattataaagaaaaaacaaatacaatgtcgacaatgccttattctgagccgttaacctcttctatggaagattctaatttagaaccaatccgagcaagagaaaacgctcaagagcctactgagcctaaagctaatattggtgagcgcatcagaggaatttttggaagtatgtttgactaaaacaataagtgaggaataaaaatggtattttcatttgatacagcatcagtacaaggtgcagttattaaagttattggtgttggaggcggtggcggtaacgctattaaccgcatgattgacgaaggtgtcgctggcgttgagtttattgcagcaaatactgatattcaagccttaagtagctcaaaagctgaaactgtcattcaacttggtccaaaattaactcgcggacttggtgcaggaggacaacctgaagttggtcgtaaagcagctgaagaaagtgaagaagttttaacagaagcacttactggcgctgatatggtatttatcacagcaggtatggggggcggatctggtacaggtgcggctccagttattgcacgtattgcaaagagtttaggagcacttacagtagcggtcatcacacgtccttttggctttgagggtaataaacgttctaacttcgctatcgaaggtattcaagaattaagagaacaagttgatacactgcttatcatttcaaataataatcttcttgaaattgtagataagaagacaccattgcttgaagctcttagtgaagcagataatgttttacgtcaaggtgttcaaggtattacggatttgattactaacccaggtttaattaaccttgactttgcagatgttaaaacagttatggcaaataaaggtaatgcactgatgggaattggtatcggttctggtgaggaacgtattactgaagctgctcgaaaagcaatttattcaccacttcttgaaacaacgattgatggagcagaagacgttattgtcaatgttaccggcggtatggatatgacacttactgaagcagaggaagcatcagagattgttagccaagcagcaggtaaaggtgtcaatatttggttaggtacttcaattgacatggatatgaaagacgaaatccgcgtaacagttgttgcaacaggtgtacgtaaagataaaactaatcaagtatctggttttacaacatcagctccaactaatcaagcaccttcagaacgtcaaagtacttcaaattcaaactttgatcgtcgtggcaactttgatatgacagagtctcgcgaaatgccaactcaacaaaatcagcctcatgcacaaaatcagcaacaaagttctgcttttggtaattgggaccttcgtcgtgataatatttcacgtccgacagaaggtgaacttgatagcaagttgtctatgtcaacgttttcagaaaatgatgatatggatgatgaacttgaaacacctccattctttaaaaaccgttaattaaaatgatgaatttacaagaaaataaaacagcgatttttgacaatgttagtaaattagcactaaaagcaggtcgcgctcatgaatcagttcatatcgtagctgtaacaaaatatgttaactgtcaaacaacagaagcgcttattagaacaggtgttaatcatatcggtgaaaatcgtgttgataaatttcttgaaaaatatcaagcattaaaagatgaaaagcttacatggcatctcattggtagtttacaacgtcgaaaagttaaagatgtcattaattatgttgattattttcatgctttagattctgttaagttagcagctgagattcaaaaacatgctcaaaaactaattaaatgttttctacaagttaatatatcacgagaagacagtaagcatggttttactattgagcaaatagatgatgcactgaacttaatttctcggtacgataaaattgaacttatcggcatcatgactatggctcccttaaaagcaactaaagaggaaatatcatcaatttttgaagagactgagagtcttaggaaaaggcttcaagctaggaacatagaacgaatgccgtttacagaattaagcatgggcatgagtagagattatgatattgctattcaaaatggatcaacatttgtaaggataggaacttcattctttaaataatggaggggaatatggcattaaaagatagatttgacaaaattatttcttattttgacactgacgatgtaagtgaaaatgaagtacacgaagtacaagagagaacttcagtgcaaagagattccagagcagctacagcacaggaagcttctcagcgtagtcatatgactaactccgcagaggaagagatgattggtagtcgtccgagaacttatacctatgatcctaatcgtcaggagagacaaagggtacagagagacaatgcttatcagcaagctactcctagggttcaaaataaagactcagttcgacaacagagagaacaagtaacaattgctctgaagtatccccgtaagtatgaggatgcacaagaaattgttgatttacttatcgttaatgaatgtgtcttgattgattttcaatatatgcttgatgcgcaagcacgacgttgcttggattatattgatggtgcaagtagagtattatatggttcattacaaaaggttgggagttcaatgtttctattaacaccagccaatgttatggttgatattgaggagatgaatattccaaagactggtcaagagacgagttttgattttgatatgaagagacgataaatatgatattagtactattaatattattaaaaacaattagggtctattcttatatcttactagcctatgccttgttatcttggtttccaggagcatacgattcatggattggtagactagtggtacagattgttgatccgattattcgcccactcagaagatttaatctacaatttttaggtctagattttacagtaatagtagcattctttttactaaatatgttgagtagatttttaatcttgctttttacataagatgacgttagatgatatttatcagcattttcgaccagaagagtatgcgtttatccataaaatagaccatttagctcaatatgtcgaaaacacctattcgtttattaccactgaatttctaaatcctagggaatttaaaatactcgaaagtgttctagagaggcgaggtagtcattattacacttctggtcagtattttcaaacagaatatgttaaagtaataatagcaccggaatactatcagttagatatggctgattttaaccttagcctaattgaaataaagtataatgctaaatttaatcaccttacccatgctaaaattatgggaactttactgaattacttaggtgtaaaacgatcaattttaggggatatcctagttgaagaaggctgtgctcaggttttggtcgatagtcaaatgacaaatcaccttgttcattcagttacaaaaattggaactgctagtgtacaattagctgaagttcccttgtccaaacttctaactcccaaacaagatattcaaaaactaactgttattgcttccagtttacgtcttgataaaattttagcaacgattttaaagatttcacgaacacagtcgacgaaattgattgaggcagataaagtcaaggtcaattatgcaaccgtcaatcgagtttctgaacaattagtagagggggatttgattagtgttagaggatatggtcgatttacgttgaaccataacctagggttaactaaaaatcaaaaatataagttagaagtagacaaaatgatacataactaaggagaaaacatgccacttacagcacttgaaattaaagataaaacattttcatcaaaatttcgcggttatagcgaagaagaagttaatgaatttttagagattgttgttgacgattacgaggacttgattagacgtaatcgtgagcaagagcaatacattaaagatttagaagagaaaatcgcttacttcaacgaaatgaaggaatcgttaagtcaatcagttattttagctcaagaaactgctgagcgtgtgaaaatttcagcacaggatgaagcatctaacctaatggggaaagctacatttgatgctcaacatttaattgatgaggctaaattaaaagcaaatcaaatccttcgagatgcgacagatgatgctaagcgtgttgctatagaaacagaagatttgaaacgtcaatcacgtgttttccaccaacgtttgctttctgagttagaagggcagctaaaattagctaactcatctgcttgggaagaattgttgaaaccaacagctatttatcttcaaaattctgatgcttctttcaaagaagttgttgaaaaagttcttgatgaagatgatgctttaccagtggtggatgacactgagtcatttgatgctactcgtcaattctcaccagatgaaatggaagaattacagcgtcgtgttgaagaaagtaacaaacaacttgaagagtcaggtttattagatactaataatttccaaatggaagaaccgatcaatttaggtgaaactcaaacttttaaattaaatattgaagattaagaaaaacaaggttttaatattatattatcagcgagtaggagatggtgagagccctacaatccctaatattgaaattatcattttcaatcattctacctgaactattatttaagtaaggtagaaggcttaacccaccttacgggttgttgagggagtaagaaatagctattttctgctctgaattaaggtggtaccacgagctttcgtcctttatgtgatgaaagcttttttatttagcaatttaaaaaattgtgataactattactataagataaggagttagtatgaaattaaaagaaaccttgaatttaggacaaacagcttttccaatgcgtgcagggcttccaaataaggaacctcaatggcaagaagcatgggatcaagctgacatttataaaaaacgtcaagcattgaatgaaggaaaaccagcctttcaccttcatgacggacctccctatgctaatgggaatattcatgtaggacatgcactaaataaaatttcgaaagacattattgtacgttcaaaatcaatgtcaggttttcgagctccttatgtgcctggttgggatactcatggactcccaattgagcaagtattagctaaaaaaggggttaaacgtaaagaaatggacttggctgaataccttgaaatgtgtcgtgattatgctctcagccaagttgacaaacaacgtgatgattttaaacgtctgggcgtttctgccgattgggaaaatccttatattacactaacaccagattatgaagcagatcaagtacgtgttttcggtgctatggcagataaaggatatatctatcgtggtgctaaaccagtgtattggtcatggtcatcagagtctgcccttgctgaggctgaaatcgaatatcatgatattgattcgacatcactctactatgccaataaagttaaagatggtaagggaattcttgatacagatacctatatcgtcgtttggacgacaacaccatttactgtaacagcttcacgcggtttaacagtaggaccagatatggagtatgttgtagttgtaccagtaggtagtgagcgtaaataccttcttgcagaggttcttgtagatagtctcgctgctaagtttggctgggaaaactttgaaattgtgactcatcacactggtaaagaacttaatcacattgttacagaacatccatgggatacagaagtagaagagttggttatccttggagaccatgttacaacagattctggtacaggtattgtccacacggctcctggttttggtgaagatgactataacgttggtattgctaatggacttgatgttgtagttaccgtagatagtcgtggtttgatgatggaaaatgctggtcctgattttgaaggtcaattctatgacaaagtaacaccacttgtaaaagaaaaattgggagatcttcttttagccagcgaagttatcaaccactcatatccatttgactggcgtacgaaaaagccaatcatttggcgtgcggttccacaatggtttgcctctgtttcgaaattccgtcaagaaatcctcgatgaaattgaaaagacaaatttccaacctgagtggggtaaaaaacgtctttataacatgatccgtgaccgtggcgactgggtaatctcacgtcaacgtgcttggggtgttccacttccaattttttatgcagaagatggtacagctatcatgacaaaagaagtgactgatcacgttgcagatttatttgctgaatacggctcaatcgtttggtggcaacgtgatgctaaggaccttctaccagcaggttatactcatccaggttcacctaatggtctctttgagaaagaaacagacatcatggatgtttggtttgattctggttcatcatggaatggggtaatgaatgctcgtgaaaacctttcctatccagcagatctttatcttgaaggttctgatcaataccgtggttggttcaactcatcactaattacatcagttgctgttaatggtcacgctccatacaaagcagtcttatctcaaggttttgtacttgatggtaaaggtgagaaaatgtctaaatctctaggaaatacaattcttcctagtgatgttgaaaaacaatttggtgcggaaatcttgcgtctgtgggtaacttctgttgactcaagtaatgatgttcgtatttcaatggatatcttaaaacaaacatcagaaacttatcgtaagatcaggaatacattgcgtttcttgattgcaaatacttccgattttaatcctaaacaagatgcagtagcctatgaaaatttaggtgccgttgatcgttatatgactattaaatttaatcaagttgtggatacaatcaacaaagcttatgctgcttatgattttatggcaatttataaagctgtcgttaacttcgtaacagttgatctatcagcattttaccttgattttgcaaaagatgtggtttacattgaagcggctaacagtccagaacgacgtcgtatgcaaactgttttctatgatattttagttaaacttacaaaacttttgactccgattctaccacatactgctgaagaaatttggtcatacctcgaacatgaggaggaggagtttgttcaattagcagaaatgcctgttgcacagacattctctggtcaagaagaaattcttgaagagtggtcagcattcatgacgttacgaacacaagctcaaaaagctctcgaagaagcacgtaacgctaaagttattggtaaatctctagaagcacatttaacaatttatgctagtcaagaagtgaaaacgttattaacagcgttaaatagcgatattgcactcttgatgattgtctcacaattaacaattgctgatgaagcagacaaaccagctgactcagtatcatttgaaggtgttgcatttactgttgaacacgctgaaggtgaagtctgcgaacgctcacgccgtattgatccaaccacaaagatgcgttcgtatggtgtagctgtttgtgatgctagtgcagcaattattgagcaatattatcctgaagcagtagctcaaggttttgaagcttaataaaaattatttaacgctatattttgacaaatatcttaccagttttaatggaagaaattggtaagacatttgtttagtagtcatcaaaaaagaagccttgattaggcttcttttaattatgctgttgttggatatgaaatttcaattaacttggcagtatggagtgatttcatctgctcttgaataataatagattgatctattttacgctttaagaagaactcacgaatagcttctaattcttcatctttgatagcacgatatttgtttgaaattaataattcataatgtttaggtgcttttgtaaaaacgacatcggtgttgccagctgaatagacttccactaattttgcatctgtattttggagttgatttcgaactagttcaggatgactactggttgtattaattagtctcataactattttccccctgattcttattaggtttattataacactatttaggaagaaaggtatgaattatttcctagaatggtgatttttttcccaagcttggacaccccatctatggcttcctcgttttagcttttctttagcttcttggataggaaaccaggctagatggttgaaatcttctagtggcgcttgatccttatgataggcagtaacttcataaatataggcgggattatagtagtaagtatcacggtgtctagagtaaaaatattcatcagcttgaccatagtaatggccaattgttgcggaataacctaattcttcaattaactcacgagttaaagcttctaggtgattttcattttcttcaatttccccacctggaagaaaccaagcaccattaggtgcctgtactaaaataattttatcatgagttggatttggaataatagcatagacaccaaatcgtgacctatagtttacattatctattttttcaccgaaagtaggattagtcatagttctctctcctgattgtgttttatgattttaaaagctttaattattttttatttattatactaaaatttttggaatatttccttaataattgtattaaaatttaaagacgaggtaggagagaaacagctttatagaggctattattttttgagaagagtgtgaaaaaaggttgagtttcttactcaaccttttgtactttcttcagtttttttagaagattttattatgatatttccattgctagtcataatagcacgaagttctttttcgcttggattctcaagatagtaatctgtgatagcatcttcaatatgttcttgaatggtacgacgtaatggacgtgctcccattttgggatcgtaacctaaatcaaccaatttttctttcactttatcagtgacatctagatgaataccattgatggcgagacgtgcattaacgtcagataacataatatcaacgatattgaggagattctctttatctaaagccttgaattcaataataccgtcaaagcggttcataaattcagggctgaagaagttacctagttgacctagtacggaattcgttctaccttctcgtgaggcaccaaagccaacgcttgcttcagttttaccagaaccagcatttgaggtcatgatgataatggtatctttaaaactaacagttcttccttgtccatctgttaatcgaccgtcatcaaggacctgcaagaacatatgcatgacatcaggatgagctttttcaatttcatctagaaggatgagcgagtaaggatttcgacgaaccttttcagttaattgtccagcttcctcgtatcccacgtatcctggaggcgctccgactaatttagcaacagcatgcttttccatgtactctgacatatcaaaacgaatcatactatcagctgaaccaaagagctcaattgctagttgtttagaaagttcagttttaccaacgccggttggtcctacaaataaaaaggaaccaataggacggtttgggctaccaagaccaactcgattacgacgaatagcttttgcaatcttaacgacagcgtcatcctggccgatcacatgttgtttcaagtcatctgcgagattaattaattgagattgttctttttcttttaaatcaccaacagggatattcgttttttcttcaatgatgtgctcaattgttttttcggtaataataggtgtatcttgatcgtcgaccttttgttgttgcatttctttatattttgcaatctggtcacggaagtaagctgcacgttcgtaatcttcttcacgagtcgcttgcgcttttaaattttctgcttcaatgagacgttgatcaatttcttttggatcaacaaaatttagtgttaggttcattttagaaccagcttcatctaataagtctattgctttatcaggtaaaaagcggtcctggatataacgattagatagtactgcagctgcttctatggcatcattattatattttacatgatgataatcttcgtattttttttggatacctttcaaaatagtaatggtttcttcaacagaaggctcatcgacttttacaggttgcatacggcgttctaaggcagcgtccttttcgataatacgatattcattgagagtagtagcacctactagttgtaattctccacgtgcaagggcaggttttaaaatattacctgcatccatactaccttcgccagctgtaccagctccaactatttcgtgaatttcatctatgaatagaataacatcttgacgttgacgaatttcttccatcaacttttgcatgcgttcttcaaattgaccacgaatgcccgttccttgtactagactcacaacatccaaacgaataacttgtttgccttgaagtttatgaggcacattaccatcaacaattttctgagcaagtccttcaacaacggcagttttcccaacgccgggttcgccaataagtacaggattattttttgtacgacgattaaggatttcgataacacgaataatttctgagtcacgtccaataacagggtcaatatcaccatggcgggctatttcagtgacattgataccaaattcttctagaatccctttggcttgagaaggagttgcagtttggttgcgattattatttcgtccattaccgtttcctccacctcggtttcctcctgattgtgtaggaggagtgtttggtaaatcttggccattaaaggctctgaaattatttaaatctccaaagaaatcatcaaagaaaggattgatgccaccaggcgcatgtgaaacatgatttaaacctgaaaaaagtggattattagggtcagttttaataatttggtagcaattttgacaaagatcaacttgcttttgttttccattaacatttgtatacaaatgaatagttgattcgtttagtttgcagttttgacagagcataggctacccctttcttatgacatttaactattgatgtgtatatagtcaaatatagtcaaactttatgcttttattatagcacctaaagcctagaaatcaagaaaaaagttctgtttttagcactgaatatattagagtgctaaattgaaaaatagatgactactgagaaaaatcgttatttgcggattttagacgataaaatcgttaaaaagttagtaaaaatgttgcttttcatgttgctttggtcacttttgtgttaaaatagaaaagactagaaaatatataggagtaagtaagatggaatcacatttagtgagaatcatcaatcgcctcgaattaatggcgactgatggtggtaatttaaaacgtaattttgaacgtgaaggtgttgttgtagcagaagtatcttttagtaatgaccctgaaaacggtcctgttttcacattacgtgatgtagaagcgcgtgaatcatattcatttgacagcattgaccttatcgcaatggaaatttacgatttattatactgataattataaaagaccttgaaggtcttttttttatatctaaatatacagtaaaatagaataaaaacaaaaatatttatctaaacttgtatttttattctttgtgtgatagactattggcaattacttttttaggagatgtcaatgaatttttcatttttaccacaatattggtcctattttaattatggtgtgatggtaaccattatgatttcaacatgtgttgttttttttggaactattataggtgtgttaattgctttagtaaagcgtactaatttacattttctcacaatattagctaatttctatgtatgggtatttcgtgggacaccgatggtagttcaaattatgattgctttcgcatggatgcattttaacaatttaccaacgattagctttggtgttttagatttagattttacacgacttttacctggtatcattatcatttccttaaatagtggtgcctatatttcggaaattgtacgtgcagggattgaggctgtaccatctggacaaatagaagcagcttactcgttggggattcgacctaaaaatacacttcgctatgttatcttaccccaagcttttaaaaatattttacctgctctagggaatgaatttattacaattattaaagatagtgctctccttcaaactattggtgtcatggaattatggaacggagcacaatcagttgtaacggctacttactcaccagttgcaccgttattatttgcagcattttactatttaatgttgacaacgattctctcagctttgttaaaacaaatggagaaatatcttgggaaaggggtaaaaatagatggttgagccaattatttcaatacaaggacttcataaaagttttgggaaaaatgaggttttaaaaggcattgacttggatattcatcaaggagaagtagtggttattattggcccttctggctctggtaagtcaacatttttaagaacaatgaatctcttggaagtaccaacaaagggaacagtgacttttgaagggattgatataacagacaaaaagaatgatatttttaaaatgcgcgaaaaaatgggcatggtttttcaacagttcaatctatttcccaatatgactgtactagaaaatattactttatcacctattaagacaaaggggctttctaatcttgatgctcagacaaaagcatatgagctacttgaaaaagttggactcaaagagaaggctaatacttatccagctagcttatctggaggacaacaacaacgaattgctattgcaagaggtcttgcaatgaatcctgatgtccttctttttgatgaacctacttcagctcttgatcctgaaatggtaggtgaagtcttgactgttatgcaagatttagctaaatctggtatgacgatggttattgtcactcatgaaatgggttttgcacgtgaagtagcggatcgtgtcatttttatggatgcaggaattattgttgagcaaggggcccctaaggaagtatttgagcagacaaaagaaatccgcacaagagatttcttaagtaaagtattataatttcattgtctaaaacaacttgttttagacttttattattccattgttatgagtaaattgttactgtattgtttggaagttggtaagtctatatataatgtagactaagaatgatagggtgatgaaaaaaatttagatgctttaaatatattaagtgtagttaatttataaaataagttgactttataaggttaatttgatactattcagttagctcctgaagaactaaaatctcttatcatggagctgatttttaccattttggtcttagaataggatgtctcatatgaattataaagagatttatcaagagtggttagaaaacgactcactcggtaaagatattaagtcagatttagaagctattaaaggcgatgaatctgaaattcaggatcgtttttacaaaacattagaatttggaacggcgggattgagaggtaaacttggagcaggaaccaatcgtatgaatacttatatggtggggaaagcagcacaagcattagctaatacgattattgatcatggccctgaagctattgcacgtggaattgcagttagttatgatgtccgttatcaatctaaggaatttgcagaattaacttgttccattatggcagcaaatggtattaagtcttatatttataaagggattcgcccaacaccaatgtgctcatatgctattcgtgctctaggatgtgtttcgggtgtgatgattactgctagtcataatcctcaagcttataatggttataaggcatattggaaagaaggatctcagattttagatgatattgctgatcaaattgccaatcatatggatgctataaccgattatcagcaaattaagcaaataccctttgaagaggctctggcaagtggttcggcaagttatatcgatgagagtattgaagaagcatataaaaaagaagtgcttggtttaactattaatgatactaatattgataagtcagtccgggtagtttatactcctttaaatggcgtaggaaatttacctgtgcgcgaagttttaagacgccgtggttttgaaaatgtttatgtggtacctgagcaggaaatgcccgatcctgattttacaacggttggctatccaaaccctgaagttcctaaagcatttgcctattcagaatctctaggaaagtcagttgatgcagatatcttacttgccacagatccagattgtgaccgagtagcattggaagtcaaagatagtaagggagaatatattttcttaaatggtaataagataggggcacttctttcctattatattttttcacaacgatgtgccttagggaatttgccacatcatcctgtattggtaaaatccattgtaactggtgatctatcaaaagttattgcagataaatataatattgaaactgttgaaactttaacaggatttaaaaatatttgtggaaaagctaatgaatatgatatctcaaaggataaaacttatctctttggctatgaagaaagtattggtttttgctatggcacttttgtacgtgataaagatgctgtgagtgcttcaatgatggtagtagaaatgactgcctattataaagaacgagggcaaacacttttagacgttttgcaaaccatttacgataaatttggctattacaacgagcgccaattttctcttgagttagagggtgctgaggggcaagaacgtattagtcgtattatggaggattttagacaggacccaatattacaagtaggtgagatgacattggagaattctattgatttcaaggatggttataaggattttccaaagcaaaattgtttaaaatattattttaatgagggttcatggtatgctttaaggccgtcagggacggaacctaagataaaatgttacctttatacgattggttgtacagaagcagatagtttatcgaaacttaatgcaattgagtcggcttgtcgtgctaaaatgaatagtactaaataagtcatatgtaaaaaggcgatgagggattcattgccttttctattgattaaaattgatacaaaatgaatagcgatataaaatagcataatcgctattttttgatataatatagaaaaaacggatgaagaaggagtatcaatgactgaattaatagatggtaaagccttatcacaaaaaatgcaggctgagttagggcgaaaagttgaaaggttaaaggaacagcatggtatcatacctggtttagctgtaatccttgttggggataatccagctagccaagtgtacgttcgaaataaagaacgctctgcattagaagctggttttaaaagtgagactctacgattatctgaatccatttctcaagaagaactgattgatattatccatcaatacaatgaagataaaagtatccatggtattttagttcaacttccgttaccacaacatattaacgataaaaaaattattttagcaatagatcctaagaaagatgttgatggtttccacccaatgaatacgggtcatctttggtcaggacgaccgatgatggtaccttgtacgccagctggtattatggagatgtttagagagtaccatgtggatttagagggaaaacatgctgttatcatcggaaggtccaatattgttggtaagccaatggcacaacttctccttgataaaaacgcaacagttactttgacacattcaagaactcgaaacctttctgaggtaacaaaggaggctgatatccttattgttgcgattggtcaggggcactttgttacaaaagacttcgttaaagaaggtgctgtggtgattgatgttggtatgaatcgcgatgaaaatggtaaattgattggagacgttgtatttgaacaagtggcagaagttgctagtatgataacacctgttcctgggggcgtaggacctatgacgattacaatgcttttggaacaaacttatcaagcagctcttagaagtgtgagtctatgattgttggtgaacaagaagcgagggcgttaattaagccacgccctaaatcaagccataaaggtgattatggtagtgttcttctgataggaggtttttatccctatggaggtgctattataatggcagctttggcctgtgtcaaaactggtgcaggattagttactgtagcaacccaaagttgcaatatcccctctttgcatagtcaactaccagaggtaatggcgtttgatagtgatgattacaaatggttggaaaaatcaattgttcaaagtgatgttattgtaattggtcctggattaggagtatcagaatcatctcgaaaaattttgaaccagaccatggagaagattcaatcacatcaaagtgtcatccttgacggatcagccttgactctgttatcagaaggtgcgtttccgcaaacaaaggctaaaaatttagtgttgacacctcatcaaaaagaatgggagcgattgtcaggtatcgctgtatcgcaacagacaaaagaaaatacccaaaccgctcttaaatcttttcccaaagggacgattttagtcgctaagagttcgcatacgcgtatttttcaagatttagacgaaaaagaaattatagtaggaggtccttaccaggcgactggagggatgggggatactttgtgtggtatgattgcaggtatgttagcgcaatttaaagaagcctctcctctagataaggtatcagtgggagtttatctacattcggcaattgctcaaggattatctaaagaagcctatgttgttctaccgacaacgattagtgatgagattccaaaagaaatggctagactatctaaataaaaaataagtagagaggtgttagcatgacacttcttttgctttatcgagctatttgtagagcaaataggtattttttaagtttttttggtataatgaagttaataaaactctcatgaggaggtgctatgtcagactatttatccgtgtcgacactgactaagtatttaaaattaaaatttgacaaagacccttatttagagagggtttatttaactgggcaagtgtctaattttcgtcgtcgcccaaaccatcaatatttctctttaaaagatgataaatcagtcattcaggcgacaatgtggtcaggtcacttcaaaaaattgggttttgaattagaggaagggatgaaggttaatgtagttggccgtgttcaactttatgaaccaagcggctcctactctattattgttgaaaaagcagaaccggatggtataggagctcttgctatccaatttgaacaactaaagaagaaactctctcaagcaggttattttgatgatcgtcataagcaattaattcctcaatttgttagaaaaataggagttgtgactagtccaagtggagccgttattcgggatattattacaacagtatctcgtcgatttccaggagtggaaatattacttttccccacaaaagttcaaggagagggcgcagctcaggaaatagcacaaactattgctttagctaacgagaaaaaggatttggatctattaattgttggccgtgggggaggttctattgaggacttatgggcatttaatgaagaatgtgttgtagaagctatttttgaatctcgtcttcccgttatttctagtgtcggacatgaaactgatacaactttagcagattttgtagccgatcgcagagcagcaactccaactgcagcagctgagcttgctacaccggttactaaaattgatatcttgtcttggattactgaacgtgaaaatagaatgtatcagtctagccttcgtcttatcaggacaaaagaggagaggttgcaaaaatcaaagcaatcagttatttttaggcaaccagagcgtctatatgatggtttccttcaaaaattagataacctaaatcagcagttaacatattctatgcgtgataaactacaaacagtaagacaaaagcaaggtttgcttcatcaaaaactgcaaggcatagatttaaaacagcgtattcatatttaccaagagcgtgttgtgcaaagtagacgactattatcaagtacaatgactagtcagtatgacagcaagctagcacgttttgaaaaggctcaagatgcgcttatatcattggatagttctagaattgtagcgcgtggttacgctattatcgaaaaaaaccatactttagtatctactactaatggaataaatgaaggagatcatttgcaagttaagatgcaagatggtcttttagaagttgaggtgaaggatgtcagacaagaaaacatttgaagaaaatttacaggaattagagacaattgtctcacgtttagaaacaggtgatgttgccttagaagatgccattgctgaatttcaaaaaggaatgcttatttcaaaagagttacaaagaactttaaaagaagctgaagagacgcttgtaaaagtgatgcaagctgacggaacggaagtagaaatggatacttgatggttactattgaaaaaattgatgaagctattcatcgttattacaaacagacacatagtgtcgtttctcctgatttgattaaggctatcctctactcagttgatggaggtgggaaacgtattcgtccacgcatccttttagaaattttagagggatttggagttgaactaatagatggtcattatgatgtggctgctgctttggagatgattcacaccggctcattaatccatgatgatttaccggcgatggataatgatgattttcgtcgtggccgcttaacaaaccataaaaagtttgatgaagctacagcggttttagctggagattccctttttttagacccatttgatttagttgtaaaagctggttttaaagctgatgttactgttaggttaatagagttattgtctatgtctgcgggtagttttggcatggttggtggacaaatgttagatatgaagggagaaaacaaagttttatctattgacgatttaagcttgattcatattaataaaacgggacgcctgttagcttatccctttgttgcagcaggtattttagctgagaagtcggaagaagtaaaaggaaaactgcatcaagctggccttttaatcggtcatgcttttcaagtacgtgatgatattttagatgtgactgctagttttgaagaattggggaagacaccaaataaagacattgtagcagaaaagacaacttatccaaatttattgggtttggataagtcacaggaaatacttgatgatactttgaaaaaagctcaggcaatttttcaaaatctagagaaaaaagctaactttaatgctagaaaaataatagatataatagagggattacggttgaatggctaaagagagggtagatgttcttgcctataaacagggactttttgatacacgagagcaagcgaaacgtggtgttatggcaggaatggtgattaacgttatcaatggagaacgttatgataaaccaggtgaaaaggttgcagacgatactgaattaaaactaaaaggtgaaaaactaaaatatgttagtagaggtggattgaaattagaaaaagctttacaagtttttgaaatttcagttgcagataagctaactatagatattggcgcctctacgggtggttttactgatgttatgctacaatcaggagcgcgtttagtttacgcagtagatgtaggaacaaatcaattagtttggaagttacgtcaggatcatcgtgttcgttctatggaacaatataattttaggtatgcccaaaaagaagatttcaaggagggactgcctgaatttgcatcgatagatgtctcatttatctctcttaatttgattttaccagctctaaaagaaattttagtggatggtggacaagtagtggcattaattaaaccacaatttgaagcaggtcgtgagcaaattggtaaaaatggtattgtcaaagacaagttggttcatgaaaaggttttgacaacagtgaccaatttcacgaaagattatggatatacggttaaacatcttgatttttcgcccattcaaggtggacatggaaatattgagtttttaatgcatttgcaaaagtgtcaagatccacaaaatcttgtgcttgaccaaatacaagatgttatagaaaaagcacataaggaatttaagaaaaatgaagaagagtgaacgtttaaatttaattaagcaaattgttcttaaccatgctgttgaaacacaacatgagttgttacgcagattggaagcttatggggtaactctaactcaagcaactatttcacgtgatatgaatgaaattggcattataaaagtgccatcagcaaaaggtcgctatatttacggtttgtcaaatgaaaacgaccctatctttacaactgctgtggcaaagcctattaaaacaagtattttatcaatatcagataagctactaggtttagagcaatttatcaatattaatgtcataccaggtaacagtcaattaattaaaaccttcataatgtcacattgtcaagaacatatttttagtttgacagctgacgataatagtctccttttgattgcaaaatcagaagcagatgctgatcacattcgtcaatcaatgattgcaatgttggagaaaaaagattagtagaggaccttatgcttttagaaatttctattaagaatttcgctattatcgaagaaatttcacttaattttgaaacaggaatgactgttttaactggtgagactggtgcagggaaatctatcattattgatgctatgaatatgatgttaggatcccgtgctagcgttgaagtgattcgccatggtgctaacaaagcagaaattgaaggatttttctctgttgaaaaaaatcaatcattagtccaattattggaagaaaatggcattgaattagcagatgaattaattattcgccgagaaatctttcaaaatgggcgcagcgttagtcgaattaatgggcaaatggtgaatttgtcaacactaaaagctgtggggcattatttggtagacatttatggtcagcatgaccaagaggaactaatgaaacctaacatgcacattctgatgttagatgaatttggtaatacagaatttaatgtcataaaagaacgttatcaaagtctttttgatgcttatcgtcagcttcgtaaacgcgtattggataagcaaaaaaatgaacaagagaataaatcacgtattgaaatgctagaatttcaaatagcagaaattgagtctgtagcccttaaatcagatgaagaccaaacgctactcaagcaacgtgataaattaatgaatcataagaatattgcagatactttgacaaatgcatatcttatgttagataacgaagagttttcaagtttatcgaatgttcgttctgcaatgaatgaccttatggctttagaagaatttgatcgagaatataaagatctttccaccaatctttcagaagcttactacgttattgaagaagttactaaacgtttaggtgacgttatcgatgatttagattttgacgctggtttactacaagaaattgaaaatagactagatgttattaacacaataacgcgaaaatatggcggtgatgtgaatgatgttttagactattttgataacattactaaagaatatagtctattgacaggtagtgaagagtcctcagatgctttagaaaaagaattaaagattttagaacacgatttgattgaatcagcaaatcaattaagtttagagcgccataagctagctaaacaattggaaaatgaaatcaaacaagaattaacagagctttatatggagaaagctgatttccaagttcaatttacaaaaggaaaatttaataaagaagggaacgaaatcgttgaattttatatttcaacgaatcccggagagggctttaagccattggtaaaagtggcttcaggaggagagttatctcgattgatgttagctattaaatctgctttttcacgtaaggaagataaaacttccattgtatttgatgaggtggatacaggagtttctggtcgcgtggcccaggctatcgctcaaaaaattcacaagattggtagtcatggacaagttttagcaatttctcatttagctcaggttattgcaatagcggattaccaatattttattgaaaaaatttccagtgactcttcaacagtttcaacggtaaggcttttaagctatgaagaacgtgtagaagaaatcgctaaaatgttggcaggaaacaatgtaacagacactgcacgtactcaagctaaagaattacttggtagttaactttggtaacgtctttaaaaagctaacattgttaggagaaattaatgttgatacacttaaattttgttataataagggtattgaaatattaaagtatagaataggataggatatgagtaaaatcaaaattgtaacggattcttccattaccattgaaccagaacttattaaagagcttgacattacagttgttcccttgtcagttatgatagatggtaccttgtattcagacaatgacttaaaagcacaaggggaattcttgaacctaatgcgtggaagtaaggaattgccaaaaacaagtcaaccacctgtaggtgtttttgcagaaatttatgaaaaattaatgaatgaaggtgtggaacatatcattgcaattcatttaacgcatacactatcaggaactattgaagcatcacgccagggagctaatattgctggtgcagatgttacagttattgattctacttttacagaccagtgtcaaaaattccaggttgtagaagctgcgaaattagctaaagagggagctgatttagataccatcttggctcgtgtggaagaagtacgccagaagtcagaattatttattggcgtatcgacccttgaaaatttagtaaaaggtggtcgtattggacgtgtaacgggtcttctaagttcattgcttaatataaaagtaattatggagctaacaaaccatgaattagtaccgattgttaaaggtcgcggtctaaagaccttcagcaaatggttagataattttgttgaaagtgcccaaacacgaaaaattgctgaaattggcatctcctactgtggtaaagctgatatggctaataactttagagaaaaactagctgttctaggtgctcctatatccgttttagaaactggctcaatcatccaaactcatactggtgaggatgcatttgctgttatggttcgttatgaataagaaaaaaatacttaccggactttctttttttctggtaagtcttcttttatcttttgggattttttccttgatcattccaaaatcaaatcctaaattaacaaaaaaagacttcctaacaaagaaagttatcccacttaactatgttgctcttggagattctctgaccgaaggtgtgggcgatacaacctctcaaggtggttttgttccactgctatcagaatcactccataatcgatactcttaccaagtgacttctgttaattatggtgtgtctgggaatactagtcaacaaattttaaaacgtatgacgacagatcctcaaatcgaaaaagatttagagaaagctgatttattgacgctaactgttggtggtaatgatgtcttggctgttattcgtaaagagctcagtcatttatcactaaattcctttgagaaaccagcagaagcatataaggaacgtttgaaagaaatccttgcaaaagcaagacaagataatcctaaattgcctatttatgttttaggcatttataatcctttttacctaaactttccacaattaactaaaatgcaaaccgttattgataattggaataaagctacaaaagaagtagttgatgcttcagaaaatgtttattttgtcccaattaatgaccgcctttataagggaataaatggtaaagagggtattacagagtcatcaaatagtcaggcaagtatcactaatgatgctctctttactggagaccattttcatcccaataatattggctatcaaatcatgtctaacgccgttatggagaaaataaatgaaacaagaaaaaactggccgtaatttaaatttctggaaatgggcatttctcttattgttggcaattaacctttccttcacagcagtgattgcaagtcgcttaattcaagtacgtgagcctaatacaggaaaaatttcgactggggtacaagataaagtaaaagtaggtacttttacgaccaataagtcgcaactgaataagacaattgcactttatttaaaacaatatcaaactaagaagatgaattataagatttatgctgcttcatcttctatactatttgaaggctcttatcaattattaggttatgaagtgcctttatacatctattttgaaccttatcgtttaacaaatggcgctgttcaacttaaagtgacctcattttcagtaggaactcttccgcttccagaaaaagatgtgttacaatatataaaatcatcttataaattgccaaactttgtagatataaaacctaaaaaatcggttattaatattaatttgcaagatttaaaaaataaagaaggtatttatttgaaagcgactgcaattgatttagtaaacgataattttagtttcgatatttttaagaaaaagccctaaaatgacgttaaatacttgaccttaagcctttttttagatatcatataatctgttaaaacttatgttgtataagtttagaatttatttggaggatttgttaacatggctaacaaacaagatttaattgcaaaagtagcagaagctacagaattaactaaaaaagattcagcagcagcagtagatgcagtttttgcagctgtagcagattaccttgctgaaggtgaaaaagtacaattaatcggttttggtaactttgaagttcgtgaacgtgcagctcgtaaaggtcgtaacccacaaactggtgcagaaatcgaaattgcagcatcaaaagttccagcatttaaagctggtaaagctcttaaagacgctgttaaataattcgtctagaaaaaccttgtcatatcaatgtttattgatagcgacaaggttcttttttatatccaatactcaataaatgactagagagattaaaggaatttagagtttcaaatgtgttagagcatacccttgaattatcttaactgtgatgttataattcctaaaagataagttaaaagagaggttgcgaaagagaatgtcagaaaaagctatactattaattatccttattgcttttgttattatcgctattataaagatagctctgttaaagttatatatgaatacgataaaacctaaagtagataatgaaggaaacatcataacaaagcctgtaaaggatgatttaacacccgaggaacgtgaagaacgtgaatttgataaagattggtaaaatcaatataaaagagcaaacaaggtttgctcttttattatttttaaaggtaattaagttgtcctcgaaaatcctccaatgattgatagcctttatcagccattatttcttttaattctctgcttacacgctgaaaaatttctggtccttctttttgtaaagcggttccgatttggaccatactagctccacatagaatgtgttcaaaggcatcacggccgtttttaacaccacctgttccgataattttaattgaaggatttaaacgtttgtagaaagcatggacgttagctaaggcggtaggcttgataaaatccccaccgatacctccaaagccatttttaggctttataacgacagtttcatcatcaataacaagtccatttccgatagaattaacacagttaataaaagctaaaggatatttgttaaaaattgtagctgcttgatcaaagtgaacgatatcaaagtaaggtggtaatttgatgcccaatggcttttgataatagctaaagatttctgaaaggatgaggtcagtcatttcaaaatcataagcaatttgaggttttccaggaacatttgggcacgataaatttaactctattaggccattgtaactactgttttcaacctttttaagaataatatgtgtctcttctggtgataaacctactaatgataaaacgtgatttttgctattgtcttgatcttgtaattcagtcacgaaatcaagataatagtcaatacctttattagggagtcccatagaattaattgatccccagtcagtatctgcataacgtggttgagggtttccctctctagcttcaagggtacctgtttttgtaacaaaggaaccagcttcagaattttcaatagctaataactcttccttagtcatacaataaatacccgctgcattcatcaaacaattgtcaaaactaaaaccagcaatttccgtttttagcgataccataatatcctcctgaagataaatttttactattttatcacttgattaatagagctgcaagaaaataatgataatggtaataaaatttcgctaaataacgaacattattgtttgtataaacaataatagtaaagaaataaatgatgctttctataatgcataaaaaataagcttatgtaagcttattttttatgttcggcgtaagattttctttagtaattgaatactcttatattttaatggatttggatagtagcggaaagtacccattttacgaacaatgtaaccattaaaattctgtttaaagcgaagtacgccatctgaaccatcaaaatttccttgaatacctaaaaaattatagaaagttgattgacgctttaaagcctcttgcataacatattcttgaagaactgcaggcgcataaaatttattaaattctgtgtatgagccagagaaaagatagacagtttctttcgggctataaataaagaggctaccagctaaaacaacatcttgatttccaaatttttgaataaaaggttcgacttctttgcgacgtttatctaaactagctagttgattgacaagctcagtacgttgacgatggtatttggcagaatctgtattattttgatggcgattatcaaggactgtaatctgttcttccaatttctttgcatttaattgtaggttatgatcatattccctaaagtttagagttgcaatgacaaattccgccttatctccgaaactatcataaaaatcttgataataatctagagatttatccatatagtcccggcgatcagaagtagaagaagtaatatccttaaagatatgtagttcttcccgcttgaggacacgtatttttataccaaaagacatggcttttttaaccaaggggcgtccttttttagagaaagatttaagaagattttgaggagtgataccttctagatttttaacataatgccaatcaggttcaccgccaggataaccaatatgaagcccatcgtggtgataacctatactagtcaggtcatcaataagataggtgttcggtgcacctttaggcttaccttcaccagtaaactcttggtaggtatcataaggtttaattaataattctaaagcgccctgagatttggcatagttctgtagttctttataaaaatgtttcagatatttagaattggaatgggctggaccagaattgacttccatatgaagtccaccagtcattgggatggtataaacaatactgatgatttccattttcccatcgatttggtagcccatgtaggtaatgtcatacccacgtttttttagaagctttgccatctcaggggtttgcataaacgattgtaaatcgtaatttcctgaataactttcgaactctttagctgttaattctttaagcgccataaaagtatcctttcctaactagctattacgttttttgcgtaaggcatagacataattagaggctttataaagcaatctgttcactggaatgttaaattctccaataaattcctcaatgattggttcgaacttagacttaaaatgatataaaccaccagataagtcattctcaatcccccccatattttgccaaatatttccacgttcaaaagccctttgagctgtttcaaaccaagtgtaaataggagcagaataagatttaaagtaatcgtccataccagcataaatattttctgatgtattaccaaattctagagtgagggttgcagccaatggaataatgtctcggtcataggctttttgagcttctttgagaaaatcaatttctttatttaatcgatcaatcgtaccttggtgttgtttaacttttttctcacgattaagttcaagtgattttattctttcagattgggctatctgacattctttttctattttttctaatcgttttgcaacatctagcgaagccattgtgatgtatgagttattaggatacgtatcaaggagtttttggtagtagtcaattcctctaagatttatccctttacggtcttccgtttttttcatcaactctgcaaaatcttcaagtagttcatggctaccaaattgtatatctactcccttatttttggaagttcgaatagcttgacgagtttttttagacattttatcaagtccaaattgattagcatataggtttgcctgaaaacgtggttggatagtatgagctaaatctgttgtccgaccagtccaatcagcacctgcacgctgtaaatgatcaatggcgattaacccttctttttcatcgggcgaattttcaaaatctttggcattgaccatttttaaatagatgagaggatcacacttgataaagagagctctttgttttttgccaaaagctttaaggtccttaaggaccttagttacaatatctagattggagtaatccatgattggtccacgcggaatatatagcatggagaagccaagaggaagtgatttgatgagaatactagcgctggcaatttgggtttcaccgtcaaaaaagccaagtaattgactaccccagttgtcttttactttgggccaattagaagattgaagtaggtttgtttggttggattcgctcacaaagcgatcgtgttcgacagcggtaatttctctatacatgagtttcctttcttagtgagagtgtctttgtttttttcgaatagtataggctaggttggccaatttatataataatggattgattgctagattaaactcgccaatatattcttcaaacattggattgaagttacttttaaattttgttaaaccatcgttaagacttccctcgacaccgcctagattagcagatacaatatcgtttttgaaagcatcttcgaacaccctagcattcaagagatactgtggataaaatttacggaagctatcatccataccagcatacaacatctccaggacattgccaaaacgaatggacaaaattcctgcaatgacaggctcatctggatatttcttgctaaactcctgaaattcaaggatatattgtttaacagaagcttcttgttgatttagccttgtcaggcgacttttttgatgggatggagtttctgataaatctttttggatttgaagaagttgttctttaaattgcgctaatcttttaggaagattgactttagctaaatagagataggcatcttctccataaattgtcattagttgatggaaatagttttcattacgtaaagctacacctttacgattctcggttaatgctacaaccgtggcgaatttaggtaaatcatcaatgttggcacgataaatttgaacaccgcgatgctttgcatcttttatcagacgtttagtgtgttttggaaagttttcttctatatttgctttggtatagatattcgcttgaaaacgaggttggatggtttcggaaatggctttcgttggacctatccattgggcacctgctgacttaagattatcaattgcctgtctactttcatctatctcttcggcgacattctcttctttaaggtgatattgacgtagaagaagtgctggatcgaattttgcaaaaacagcacgtttctttcgtccaaagttttttagtgtttttaacacaaagttaactaattctttattgctgtagtccataataggtccacgtggaatataaagcattgtaaaaccaagtggtaatgatttaattaagatgctagctacagcaactaattggtcatctttataaaagcctaaacgttcattttgccaatttgattttacttgtgcccactttgaagagtggaggagattggtttgagacgatgcaatagcaaaggcatcatattctttttcggatattccaacggtaacatgatacatcagtttattacccattcacgtagtgcgtaggctacgccactttcctcgtttgatttggtgatatattttgctattttttttagttcaggattgccgttttgcataacaacaggatttccaacaacttcaagcatagcacggtcattttcttcatcaccaatagccattgtttgatctacagttaatcccattttctctgcaaggtggagaagtgcagtgcctttattaacgtttttgggtaaaatttctaaataaaaaggagttgattttacaatagtgtagttatcgagaactttttttggaattttagcaattgctgcatctaagatgtcaggttgatcaatcatcattagtttaatgatttctttgtctcccatttcttcaggagtacgatagaagagcggcatattaactaaagttacttcgtgtattgtatatttaccaatatcacgatttgctgtgtaaattccttcttttgtaatggcgtgcatgtggacgcctaatttacgcgctaacagttcgaaatccagatagtcttcataggttaaggtttctttgatgatgtcatctcctgtggctgtgtcttgaactagaccgccgttaaaggtgataacataatctccctcttcattgagtttcaattcttctaaaagatcttggactccgatgattggacgtcctgtagcaataacaattttaacgccttttgattttgcttcttgaacagctttagccacttcaggtgtaatttcacgcttactatttaatagggtgccgtcaatatctacggcaacaagtttaattgaagtcattttatctcccactctttattcaatatcctaaaatactcaccttatatcttactaaaaaataaagggtttgtcatgaatggctattatctttcgtgagtgtcaaatgctcatttgtgatataagattgaaattcttcttttgtacttgaaaataggctatctaatgtcaacatttcttttggaaaataaaaacgttgatcaccataattagatccagttaatgcttttacaatcggtgataagcttgataattcagcaagttgtccattcttttggataatttgaatttctgttcgtggatttgaatgttcaggccgataaacatcgtaaggtaagtcaaaattagcatggacaccagtgtaataatcgggatcaaaaccaacctgtgagactagttctttcattttaactagattttctttatcagactcttcaaaggtaattgatttaaagacttttcgattgataaaacgattagctaaatctgccaaaatgttatcatcagcttgcatccaagattggaagtaagtattcattaccccatcatctagggctaaataatcttgtaaatcatattgatccgtgaagaaaggaataagatttggagaagtttgttcaaaaaaatcgcgatgggtatcaaataagaagcgagcacgttttagtaaattttgtaagagtaattccatagcacgactggctggatggaaataaacttgcatatacatttggaagcgactaacaatataatcttccacagcgtgcatcccgttacgagcaaaagcaattccagaatcggttggtctaataacgcgtaaaattcgtgttaaatcaaattgtccatagctagcagcagtgtagtaagaatctctgagaagatagtccattcgatcacaatcaatttgactagaaattaattgaacaacttgtttattggggtagctatgattaataacactagctactttatcaggaaaatcaggagccacctttcgtaaaatagcattaatctctgtggtaggattggtgatgatttcctgagtgtaagcttcatgatcagtattgaagagacgctcaaatgtatgagaatatgcgccatgtccgatatcatgtagtagggcggcagccatcgttagcagggactcatttttattccaaagatcagaataatgttcatcaaagatttctgtaactttacgagccagttcataaactccgagacaatgtgaaaaacgactatgctctgcaccatggaaggtaaaagaagtcgttgaggtttgtttaatgcgtcgtaaacgttgaaattctttagtgttaatcaagtcatatatgacttgattatttacatggatataagtgtgaacggggtcacgaaatactttttcattcatatatatattatagcaaaaattgaaacttgagtcagaaattggtagaatagaaggataaaagaagtgagagaagtcatgaaactagaaattaacaataacattcaaattgacaacgaaaccgaaatgattcatgagattcacgattgtcaatttattgaaaaaggaagttacgtttatttgaattatattaatgctgagggcgagagggtagttattaaggcaaatcatgaggaattgcttatgacgaggttttcaaatcctaagtctgtaatgcgttttcatcgtgaaacgcctgctttggttaatatccccactccacttggtgttcaacatttgattacagagacaagtcactatcagtttgatttgtcacagcaaaggttgcatatcaattatgtccttaagcaaacggagacaggagactgttttgcaaattatgaattaaggattcaatggtattaagataactaccattaacaaaagagtagtcgttatgaatttcgtttactgaagacgctgggatctctttatgagagccatttatttgataaactgcagtgtggtttatttcgactagatgaacttcgttttttcccttgagattattagtgatagcaaggataattaattgaaaaatggatttttttctgttacaatgattaacatatcaagggagtagcagacggtttaccgtggcaatgtcgtcattacgaaagaaatttccggcgttgtcttaaacagcgagacttgttttcataaaaacaggtctctttttgtttgtggagagaccaaaggaggaaaggttttgttaaaagaacagaaaaaatccttgttttacacacaaggtcaagaagaggttctaacgtctttagaatcttctcgtgaaggattatcaacgacagaagcgaaaaatcgcttagagatgtatggtcgcaatgagcttgaagaagggaaaaaacgtagtctaatagctaagttttttgaccaattcaaagatttaatgattattatcttactggttgctgcagctctctctgttattacggaaggtatgcatggcttaacggatgcattgattatcttggcggttgttatcttaaatgcagcttttggtgtttatcaagaggggcaagccgaagcagctattgaagccctcaaagatatgtcaagcccaattgcgcgtgttcgtcgtgatggtcatactattgaggtggattctaaagaactagttcctggtgacctcgttatgttagaagcaggagatgttgttcccgcagatttacgacttttagaagccgcgtctctaaaaattgaagaagcagctctaactggtgagtcagtacctgttgagaaagacatatctcaagtagtagcagaggatgcaggtattggtgaccgtgtgaatatggcgtatcaaaattcaaatgtcacgtatggtcgaggatatggtgttgttactaacacagggatgtatactgaagttggtaaaattgcggacatgttggcaaatgctgatgaatctgaaacaccattgaaacaaagtttagttcaactttctaaattattgacttacttaatcgtgattattgcggttattactttcttagtggggatatttgtccgtaaagaaggttggattgaaggattgatgacttcagttgctttagcagttgcagctattccagaagggcttcctgcaattgttacgattgtcttatcaatgggaacaaaaactcttgctaaacgcaattctatcgttcgtaaactccctgcagttgaaactttaggttctacagaaatcattgcatcagataagactggaactctgacaatgaatcaaatgactgtcgaaaaagtgtatactaatggtgttctccaatcatcttcggaagaaatttcagttgataataacactttacgtattatgaatttctccaacgatactaagattgatccttcaggaaaattaattggtgacccaacagagactgcactggtacaatttggtttagataagaattttgatgtccgtgaagttttgaaaaatgaaccacgtgtagctgagttaccatttgattcagatcgtaagttaatgtctacgattcataaagaatcagatggtcgctactttatcgcagtcaagggtgctcctgatcaattattaaaacgagttactaaaattgaagataatggcttggttcgtgatatcacggctgaagataaagaggctatcctaaataccaataaagaactcgcaaaacaagctcttcgtgtcttgatgatggcttataaatatgaaacacaaattccaagtttagagactgatattgttgagtcagatttagtattctcaggtttagtgggaatgattgaccctgagcgtccagaagcggcagaagctgttcgagttgctaaagaagcaggaattcgtccgattatgattaccggggaccatcaagatactgcagaagctattgcaaagcgtctaggtattattgatgcaaatgacacagaagatcatgtctttacgggtgctgaacttaatgaattaagtgatgaagagtttcaaaaagtatttaaacaatattctgtctatgcacgtgtttctcctgaacataaagtgcgtatcgtgaaagcttggcaaaacgatggcaaagtcgttgccatgactggtgatggtgttaatgatgctccatcgctaaaaacagcagatattggtattggtatgggaataactggtacggaagtttccaaaggtgcttctgatatggtccttgctgatgataattttgcaactattattgtggctgttgaggaaggacgtaaagtcttctcaaatatccaaaaatctattcagtatcttctttcagccaacatggcagaggtatttacaattttctttgcaactttattaggatgggatgtacttgcaccggttcaccttctttggattaacttggtaacagatactcttccagccatcgctcttggagttgagccagctgaaccaggagttatgacacataaacctcgtggtcgccagtcaaacttctttgatggtggtgttatgggagctattatctatcaaggtattttacaaactatcttagtacttggtgtctatggttgggcattgatgtatccagaacatgctggttatcgcatgattcacgcagatgcccttacgatggcctttgcaacgcttggtttaatccaattggtacatgcatttaacgttaagtcagtttaccaatcaatctttacagttggagcttttaaaaatagaacctttaactggtctattccagtagctttcattcttttgatggtgactattgttgttcctggatttaataaacttttccatgtaactcatttaagttcaacacaatggttaactgtagttatcggaagtttattgatggtagtgttaacggaaattgttaaatttatccaacgtaaattaggacaagacgaaaaagctatttagtttagctgataaaaaaactcacttagaatatctaagtgagttttttagcaatcaaatattgtcatagagttgcgtaattcgtcttcaaaatatttttttcgatagttttcaaaactatccaaatgcttaacggcattataccttttgctaagattccaggttaaattagggttatgattgggattctgattgacaaagtcaatagttaaattccattctctaatatatccaagtggtctagaatgataagtagtctctccaattttaacgtcgccaaatgagcggtgtgcatgaccaaaaacaacatctttgatatgatatttttggaataaatcatgataagcctgactccccaaaaaagcattaaaaggagagaatctaggatgagtcatcgtgaattgtttatggggaacaaagtgcatagcaataatgatatttgaagaatcgacttttgctaatatttcgtctaagcgttttaaaattgatgcttggatagttacatcattatttggacgttttaaacgtctatcaaaccaaaaagtcttttttaatttttcaacatccttgatgtctctattatttgaaaagctgtaatcataccagccatgaaaagctagtagcatttttttgtcaaatcgataggtttgaaagtcaagacgttggatttctgtttctgttaaatcaagcatatcatggtttcctaaattatagctaagtttaatatgcttttttaagttattgataaagggaagtgtatctttagtaaaatgattagatatatctccagcgatatggaggtgatcaattttttctttcttaagcaaattaattaacgttttcgtctcaaaggtagaaaaatgattgaggtcaatatgtaaatcactcatgatagcaagtttggtcataagggtattgtaccatattgtagttcaaagagttaaacagtaaatttttgaaatagttttagagtcattctataatagatatgtcattgtagaatgcgctttcataagtgtgtttagaagttttatatttaaggtgccttaaggaggtctcatgtctaatttttataagctcttgaaagaaaaatttcctcgaaaagaagatatcgtaacagaaatgatcaatttagaagctatttgtcaattacccaaagggacggagtattttattagtgatttacacggggaatacgatgctgttgattatctcttacggacaggtgcagggtctattagagctaaattattagactgttttgattggcagaaaatagttgctgttgatttagatgatttttgtatactgctttattacccaaaggaaaaattagccttcgataaaatgaacttgtcagcaagtgcttataaaacgaagttatgggaaatgattccgttacaaatacaagttttaaaatatttttctagtaaatatacaaaatctaaagtacgtaagcaattgtcaggtaagtttgcttacattatcgaagaacttttagctgagattgaccgtaacccagagaagaaaagctattttgatactattattgaaaaattatttgaattagaccaagtagaagatttaattatagtattgtcccaaacaattcaagttttgattattgaccatttacatgttgtaggggatatttacgatcgtggtaggtatcctgatcgtatcttgaataggttaatggcttttccaaatttggatatccaatgggggaaccatgatgtcacttggatgggagcagcatctggttcttacctttgtatggtaaatgttatccgtattgctgcacgttataataatattactttaattgaagaccgatatggtatcaatttgcgtcgcttggttgattactcacgccgttactatgaacctctaccttctttcgttcctatattagatggagaggaaatgactcatccagatgaactagacttgttaaatatgatacaacaagcaacagcaattttacagtttaaattggaagcccaattgattgacaggcgtccagaatttcaaatgcataatcggcaacttattaaccaggtaaattataaagatttaagtatatctattaaggaagttgtgcatcaacttaaagattttaatagtagatgcattgattcgaaaaatcccagtcgattaacaagtgaggaagaagagcttttacaacaattgatgatagccttccagacttctgaaagtttaaagaaacatattgatttcctatttgaaaaaggaagtatgtatttaacatataatgataatcttttattccatggttgcataccaatgcatagtaatggtgattttaaaagctttaaaattgcaggaaaaacttatggtggtagggatttactggatttatttgaaagtcaaatacgtctagcatatgctagaccagagaaacatgatgatttggcgacagatatcatttggtatctttggtgtggtgaaaattcttctctttttggtaagaatgccatgactacttttgagcgctattatgtttccgacaaagtaactcatcaagaaagaaaaaatccctactttaaactgagagataaagatgatatttgcactgctcttttacaagagtttgatttgcctaagtttgggcatattgtcaatggtcatacgccagtcaaagaaaaaaatggtgagcaaccgataaaagcaaatggtaagatgttagtaattgatggtggctttgccaaaggttatcagaaaaatacaggtttagctggctacactttgatttataatagctatgggatacaattaatttcacaccttccttttacatccattgaggaagttttaagtggaaccaactatatcattgatacgaagcgattagtagaagaagccaaggataggattcttgtaaaagatacaactattggacaaaagttaaccaaagagattaaagacttagatcacctttatcgtcattttcaggaatatgatgactagtgtttaagtaatttactaattgatatgtaggatttaatttttcagtttcttaccttgtctcttttattaaattgacttaaaataatattatggacataaaggcagaaattcaaaaattagcaaaagaaattggtatctctaaaattggttttacgacggcagataactttgattatttggaaaagtcattgcgtgcttctgtggaagaggggcgcaattcaggatttgaacataaagtcatagaggatcgtatctaccctgaaaggcttttagaatcggctaaaacgattatttcaattggcgttgcttatcctcacaaacttcctcagcaacctcaaaaaacatcttataaacgaggaaaaattacacctaattcgtgggggcttgattatcattatgtggtcggcgaaaagttagacagactatcaaaaggcattgaagagctctgtcgagattttcctttgcaacaaaaagcaatggtcgatactggagctttagttgatactgcagttgcccaaagagcaggtattggttttataggaaaaaatggtctagttatttctaaagaatatggctcttatatgtttttgggagaattaattaccaatttagagatcgagccagacaagcctgtcgattatgattgtggtgactgtcgtcgttgtctagatgcctgtccaacttcttgtttaattggtgatggctcaatgaatgccaagcgttgtctatcatttcaaacccaagataagggaatgatggacatagagtttcgaaaaaagattaaaacagttatctatggttgtgatatttgccaaatttgctgtccttataacaaaggtataaataatccattggcgacagagattgatcctgagttggctcaaccagaattaataccatttttgagtttatcaaatggacaatttaaagaaaaatttggtatgattgctggaagttggcgaggtaaaaatattttacagcgtaatgccattattgcgctagcaaatgctcatgataaaaccgcagtggtcaaattaatagagattattgataaaaataataaccctattcatactgcaacagctatatgggcattgggagaaattgtcaaaaaaccaaacgatgagatactggagtttatgagtaatttaaccttaaaagatgaagatagccgaaaagagttggaattaatccgtcataaatggcaattttaagccttttatggtatttttaagaaccttatgataaaataaaacagattaacaaagattggagaaatctcatggaagtggctgaaattcgccaaaaaatagtagaaaataaagagaagttgactagcttcaggaggtctctttgacttagatcgtttggaagaggagattgctcttcttgaaaatcaaatgactgagccagacttttggaatgacaatattgcagcgcaaaagacatctcaagaactgaatgagttaaaaggtaagtatgatactttccataatatgcaagaattatctgacgaaacagaactcttacttgagatgcttgacgaagatgattctttgaaagaagaattagaagaaaatctaatgcagctagataagataatgggtgcttatgaaatgacgcttctcttatctgagccttatgaccacaataatgctatcttagaaatccatcctggttcaggaggaactgaagcgcaagattggggagatttactcttacgaatgtatacccgttttggcaatgctaatggtttcaaagtagaagtattagattatcaagcaggggatgaagctggtattaaatcggttaccctctcttttgaaggccccaatgcttatggtttgttgaaatcagaaatgggagttcatcgcctcgttcgtatatcaccttttgattcggctaaacgtcgtcatacctcatttgcttcagttgaagtgatgccagagttagatgatacgattgaagtagaagtacgtgatgatgacattaaaatggatactttccgttccggaggagctggtggtcagaacgtcaataaagtatcaacaggtgttcgtttgacgcatattccaactggaattgtggtatcgtctaccgttgaccgtactcaatatgggaaccgcgatcgcgctatgaagatgttgcaggctaagctatatcagttagaacaagaaaagaaagcacaagaagtagatgctcttaagggtgataaaaaagaaatcacttggggaagtcagattcgttcttatgttttcaccccttatacgatggtgaaggatcatcgtactaactttgagcttgctcaggtagataaggttatggatggagaaatcaatggctttattgatgcctaccttaagtggcgcattgaagactaaaaataatgaaggagaaacatggcactaatagaaatgtctggtgttactaaaaagtatcgccgttcaacaactgccttgagaaacttaaatttatcaattcagcaaggtgagtttgtgtatttagttggtccgtcaggtgctggtaaatctagcttgattcgcctcctataccgtgaagaaaaattaagttcaggtagattaaaggtaggggaattcaatctcaataaactcaaacgtcgtcaaattcctattttacgtcgtagtattggagttgtcttccaagattataaattactaccaacaaaaacagtttatgagaatgttgcgtttgcgatgcaagttattggagctaagcgccgtcatattaaaaaacgcgtgccagaagttctagaattagtaggtttaaaacacaagatgcgttcttttccaacacagttatctggtggagaacaacaacgtgtggcaattgcacgtgcgattgttaataatccaaaattattaattgcagatgaacctactggtaatttggatccagaaattgcttgggaaatcatgcatctattggaacgtattaaccttcaaggaacgactgttttgatggcaacacacaatagtcaaattgttaacacacttcgtcatcgtgtcattgagattgaagcaggtagcgttatccgagatgaagagaagggagaatatggttatcatgattaatttctttagacatttctgggaatcgcttaaaaacttgaaacgtaacttttggatgacttttgcttctgtaacatcagttaccataaccttacttcttgtaggcttgttttcatcagttttactgaatgttgaaaagttaacaactgatgtttcaggtaattttactatcagtgcctttttaaatgttgactcaacggatgctcaaaaacaagtcaaagataaggacggaaagctaaaagataatcctgattatcataaagtttacgacaaaattaaacgtatttctggtgtagagaaagtcacttattcaagtaaagctgaacaattaaaagaagttcaaaaagagtatggttcagatgttattgatgatacctataaagatgctttgttagatgtttacgtagttgggacaagttctgcaaaagtttctaagagtgtcagtgaagcaattggacgcattgaaggtgttgattatactaaagaacctattgattcaacaaaactatctaatctcacagataacatccgtatatggggatttggtggtgttgccttattaattgtccttgctatctttttgatttcaaatactattcgtatgtcgattatgtcacgccgtacagatattgaaatcatgagattagttggcgctaaaaattcttatattcgaggaccgttcttttttgaaggtgcttgggtagggattttaggggctatcgttccatcgctgattttctattttggttatcaatttgtgtttaacaagtttaatccaaaatttgagacaagccatgtttcattgtatcctatggatattatggttccagcaattattggtggtatggtgattattggtattattattggctcacttgggtctgtcctatcaatgagacgttaccttaagatttaataaaaagagatgaaatctatttcatctctttttattaattgtagatatcatgttagtggataaaattcgaaataaacgtagccaattgtttttcagatgatttgtgagaaagggtagctttaccatcccctttttgatgtccgtagttaccaaatcggctatggtttcctccgacaatagttcgaaaagtacttgaatttgggaggcgttttttagcttcctcatatttttcccagtttaaaatatgatcattacttgctgtaatggagagtactcttaaatttttatgagataggtcggatttacgtgaagggtaggaagctaataatatgagccctctaacaggggctactttggcattttggctagcaacaactcctcctaaagaatgtccagcaaggtaaacattagttaagtggttctgattaataattgttttagctttatgaggcgataaaactggcaaatttaaaggtgtcttcaaaatataggtattatcccctttgtcagctaaatctctagcaagttgagaataagcttcttcttccacaagagccccttgatagaaaataatatttgcttttaccttacccttgcttctaaaaagaaggtagttcttatggtttgtagcggttttagcaattctcctagctaatggggaggcttggtaagtattgaagtaaatggtcatcccgacggccattaaaatagcaaggatacttgttgttaaccaaagaaaaatagagtgacgttttatgttcattggaagaaaggattaaagtttttttcgtggccaatagttgtattcatgccatggcctgggtgaacactataatgactaggtaaggtgaatagttcttgacgaataccagtaatgaggtcctcaaagttactggtaggtaagtcagtacgaccgatagtttcacgaaatagagcatcgccagtaacgactaattcatctgagtggaaaacaaacgagactcctccccaagaatgaccaggtgttggtaaaactgtgaattcaaaaccatttagttgatagggttgctttaatttaaaaaagttctctgccggtcttgctataacattaatgatatcatcatgacggcctaacccagataaattatcatctggggaagatagccaagcggcttctttttctgaaacataaacaggtggattatcaaaagtatctctgaccaaatctaaactaaaaatatgatcatagtgagtatgagttaagaggatagccactaaaggtttttcaaaggatttaattttagcaataatttcttggccattgctccctggatcaatgaggataacagcttgatcattaacgaggtaataagtattttcaccagcaatgtggtttattgttttatagattttcataatgatagtgtaccaaaaaatcaagactttgttaaaaaaagagtggcggaaaataaatggcaactagtttcagaaaatatgggatctcacagcaatttcttgacaccgttttcataaaggtgtatcataaaagtaatcaataagccaagcctaaagctgaacttagtttaagaacactgactttttgagagcaacctaattggttgactaaagaatatgaggtggaagatatgtcaaaagttgctattgttactggtgctggtcaaggaattggatttgctattgcgaaacgtcttcatgcagacggctttaaaataggcgttttagactataatgaagagactgctcaggctgcggttgataaactatcacctgaggatgctgttgcagttgtagcagatgtttcaaaacgtgatcaagtttttgatgctttccaaaaagttgtagatacttttggtgatttgaatgttgttgttaacaatgcaggtgttgccccaacaactcctcttgacactattactgaagagcagtttgaaaaggcttttgcaatcaatgtcggaggaactatttggggaagccaagcagctcagaaacattttagagaattaggtcatggcggaaaaattataaatgcaacttcacaagcaggatgtgaagggaatcctaatttgactgtttatggtggtacaaaatttgcagttcgtggtattacacagactttggcaaaagatttagcatcagaaggaatcacagtcaatgcttacgcaccaggtattgttaaaacacctatgatgtttgatattgcccatgaagttggtaagaatgcaggcaaagatgatgaatggggtatggagcagtttgccaaagatatcactttgaaacgcttgtctgaaccagaagatgttgctaatgcagtaggcttcttagcgggagatgattcaaattatatcactggacaaacaatagttgtcgatgggggtatggtattccattaaaaatgattaatgctaacactgtgagtttcactcacagtgttttttatatttcttaaaaaattatcttatcttggttattggagtgatggcatctttgaggtatagtcatgttttgttttatagatatagcgtgctataatagacttactatgacccagaaaaaacttagaaaatatgcagtagttgacttggaggctactggagcaggtcccaatgcttctattattcaggttgggattgttattatccaaggaaataaaattattgatagttatgaaacagatgttaatcctcatgaatctttggatgagcatattgttcatttgacaggtattacggataagcagttggctaaagctccggattttggtcaagtggcgcatcacatttatcaattgattgaagattgtatttttgttgcccacaatgtaaagttcgatgcaaatttattggctgagcaactatttttagaaggctgcgagttacgtacaccaaggatagatacagtagaattatcacaagtattttatccctgtttagaaaaatattctttaggggcattagcagaaagcttaaatattgaattaacagatgcgcacactgctattgcagatgcaagagctacagcacagttattcattaagttaaaagctaaaattagtagtttacctaaagaagtgttggagaccattttaacatttgctgataatcttttgttcgaatcctatttattgattgaagaagcttatcaagaagctgatttcgttaatcctaaagaatattatttctggcaaggattggtcttaaaaaaagaaaaagctgttggaaagcctaagaaattatctagtgattttcaagttaacatggctttgttaggtatggatgctcgccctaagcaagttgtttttgctgacttggttaaagcgcattttaatgatcaaacaacaacgtttttagaagctcaaccaggacttggtaaaacatatggttatctcttgcctttattggatcagtctcaaaaacaacaaataatagtatctgttccaacaaagattttgcaagatcaaataatggctaaagaaataaagcacattcaagaactttttcatattccctgtcacagtatcaaaggaccgagaaattacttgaagttagatgcgttttataagagcctccaagtgcaggatcgaaatcgattgataaatcgttttaaaatgcaactgctagtgtggttgacggaaacgactacaggtgatttggatgaaattaaacaaaaacaacgattagaatcttactttgaccagctaaaacacgatggagaagtgactcaatcatcacttttttatgatctggatttttggaaacgcagttatgataaagttgcacaaagtcaacttgttattatcaatcatgcttattttcttgagcgtgttcaggatgacaaagattttgcaaaggggaaggttttagtttttgatgaagctcagaaacttgttttgggactggaaaatttttctcgtgggcaacttgatattagtcaccaattgcaggttattcaaaaaataattgatagttctattccattattacaaaagcgccttctggaaagtatctcttatgagctaagtcatgcagtagaacttttttatcgtcataattcttttgaattttcagagacctggttgaaacgtctaaaaaatagtataaacgctttagaagtagtaggattagatgagttacaaacttttttcacagctacttatactaactattggtttgaaactgacaaagtcaatgagaagcgtttaaccattttacgtggggcgagagaagattttcttaaattttcaaagttcctcccccccacaaaaaagacctatatgatatcagcgactttacaaatcagtcccaaagtctacttgtcagatcttttaggaggattttcaagtataagtacagaaaagatagcgcatgagaaaaatgccaatcagaaagtatggattgatacctctatgcccaatatacttgatttatcaccggaacagtatgcttacgaaatagccaagcgtttacaagatataatgacgttaaagcagcctaccttagtcttattaacttctaaacagacaatgtttatggtatctgattatttggataagtgggagataaaacatcttactcaagataaaaatggcttagcttataacgttaaaaaacgttttgatcgtggagaaagcaatcttcttttaggtacaggatctttttgggaaggtgttgactttgtacatcgtgatcgtcttattgaagttatcacgcgattgccttttgatactcccaaagactattttatccagaaactatcgcagagtttaacaaaagaggggaaaaacttcttttatgactattctttaccaatgactgtcttaaaattaaaacaggccttgggacgtactacaaggagagaagaacaaaagtcagcggtaattattttggatagcagattggttattaaatcttatggacaaaccatcatgcattctcttggtagagattttgaaatttctaaggaaaaaattaacaaggtcttgactgaaatggctaaatttttgatataatggtaaagatcattgtctaaaaataagattttgacagtgcgactcaagattaaataatagtagtacgttgataaaaggaggagtaatgacctatttgtcagaacgtgtactcaatatggaagagagtgttactttagctgcgggagctaaagcaagagaactcagagtacaaggaagagatattcttagtttaactttaggggagcctgactttgctactcctaaaaacattcagcaagcggctattgaggctataacagatggacgtgcaagtttttacacaccatcaagtggtttgccggagttgaagtcagcaattaatgcgtattttgaacgtttttatggctactcccttaaacctaatcaggtggttgtgggaactggtgctaagtttatcctttatactttctttatgacagtactgaatcccggtgatgaagtaattattccgactccttattgggtatcttatgctgatcagattaagatggctgaaggtaagccagtttttgtcacagcaaaagaagttaatcacttcaaagtaactgtggaacagttagaagctgttaggactgataagacaaaagtcatacttcttaatagtccatcaaatcctacaggtatgatttataaagctgaggagttggaggctattggaaattgggcagtcgaacatgatatcctaattttagcagatgatatttacggtcgattggtttacaatggcaatatttttacccctatttcaagcctttcagagtctattcgaaaccaaacgatagtcataaatggagtttctaagacttatgcgatgacaggttggcgtgttggttttgcagtgggtaatcatgatattatagcggcaatgtctaaagtagtcagtcaaacaacttctaaccttacggctgtctcacagtatgctactattgaggctttaaatggttctcaagagtcatttgaaaaaatgaggctagcatttgaagaacgccttaatatcatttatccattgttgtgtcaggtccctgggtttgaggttgttaaaccacaaggtgctttttatcttttcccaaatgttacaaaagcaatggaaatgaaaggatatacggatgttacagcattcacggatgccattcttgaagaagttggacttgctttagtaacgggtgctggttttggagcgccggaaaatgttcgtctgagttatgctacagatcttgaaacccttaaagaagctgttcgtagactgcatgtctttatgggaagtaatgaaattaattaaataaaaatagagagaaacttatgtcaaaaaaacttatttcaattgttgatgttaaagattatgttggtcaagaagttactattggtgcttgggttgctaacaaatcaggtaaaggtaagattgcgtttgtacagttgcgcgatggttctgcctttttccaaggtgtcgcttttaaaccaaacttcattgaaaaatatggtgaagaatcaggtcttgaaaaatttgacgttattaaacgtctcaaccaagaaacatctgtttatgtaacagggattgttaaagaggatgaacgttcaaaatttggctatgagcttgatattactgaccttgaagtcattggagagtcacatgaatatcctataactcctaaagagcatgggacagacttcttgatggacaaccgtcatctttggttgcgttctcgtaaacaaatggctgttatgcaaattcgtaacgctattatttattcaacttatgaattctttgaccaaaatggttttatcaaatttgatagcccaattttatcagaaaatgcagcagaagattcaacagagttatttgaaacagactattttgggaaaccagcatttcttagccaatctggtcaattataccttgaagctggagcaatggctctaggccgagttttcgactttggtccagtctttcgtgctgaaaaatctaaaacacgtcgccatttaacagaattttggatgatggatgctgagtattctttcttgtcacatgaggaatcacttgacctccaagaagcttatgttaaagcattgatccaaggcgttctagatcgtgcgcctcaagcacttgatattttagaacgtgatgttgaggctctcaaacgttatatcgcagagccattcaagcgtgtttcttatgatgatgctattacacttcttcaagagcatgaagcagatgaagatacagattatgaacatttagagcatggtgatgactttggttcaccacatgaaacttggatttctaattactttggagtgccgacatttgtagtgaattacccagcaagctttaaagcattttatatgaaaccagttcctggaaatccagaacgcgttctttgtgctgatcttctagctccagaaggttatggagagatcattggcggctcaatgcgtgaagacgactacgatgctcttgtggctaaaatggatgaactaggtatggataaatcagaatacgacttttaccttgaccttcgtaaatacggctctgttcctcatggcggttttggtataggtattgaacgtatggtaacttttgttgctggtaccaaacatattcgcgaagctattccattcccacgtatgttacatcgtatcaaaccataataaaaaagcgctagctagtgcgcttttttattatggtctttagaatcgttggttaattaaattgggactatgtttttttaacaatgtgattgtcgaaaagacaaggataagactgattagtcgatccatataatctgttccaacttgaacaagtatcaaactacttgtcatgtctaatccaattccatgtaagaattgtgctataatacttgagccactagaggtaattcctttaaaaaggataactgttataactgaagcaataatagttcctggtaaagaaataatcagtgatttccacaataggctagagggtttacaattccttttaatcaagatacccgtaatgatagcaaccacgatggcgactggtgaataataaagtgaaaaaatatcagtagtcatccaattgatgagtgcactgagaaaagcagtgctggcagcgtaccatggtcccaggataactgctattaacaatgtacctatagtatctagatagataggtaggcgtaaaaatagagctaaattagccccaacaaggttgatggcgatagcgattgagataaatgaaattaaacgagcaggtgattttgtcatttgttaagtcctaacatttctaagtcttcaatgatgactgaattttgtgcatgtaataggacggtcataaaatcattccaaaataaattagtattgactgaggttaaaatcttactgttagcatcttttttataaaaatgatactgatctacaattgtttgtcccatggcgattccgtgacaagcaacatcggtatagctatcaaaaccagtagcgatattttcattaacaaagtaagcaatagctaaaggatcatttatcacacatccaataatatgctcatattgccagtgaaaatcgaagtagaactttgtgattttttggataaaacttgatacgtctggattaatacgctccatataagataaatgattgggggttaatacaatatgacgtgtgatgtctagtccaaccatctctatttttttgtcaaggttttcaaatacatattgtgcagcatgaggatcacaccaatagttgtattcagcaactggagaacaattgccatgtgatttaaaacttcctcccatgctaataaatcgcttgcaatgtttgcctaatttgggattagtttgtaaggctcgagcgatattggtcagaggtccgagagctataatagaagtatcatttttgtgttcaaaatagtttgctaaaaaacaatctgctgattcttcttgaaagataattggttgcgccaatgtaaagttattctctccaaggccatccattccatgagtatcctgagcagatacaaattcacgttgtaaaggcaagttatcaccaacataaactggaatgtcgtgacggtttagtaattcaagcgttacaaaggtattctttagtcctagctcaacaggcgaattgcctgctgttatagtaatagcaacaacttctaacttaggatgctgaatagcatacatcagtgctaaggtatcatcaataccgggatcgcaatcgataataattttttctttattcatttgtctcctttcttttaatattagtgaatgttctatgcttttatgaaactattaacaatagtcatggcaataaaaaagatcttggcagttaccaagatcacacgaaaaaatgaatttagttttctaaattcaatcatattttcagtcacttagttttttattctgggaagttttcgaaccagtccgagaaatactcgattatgcacgtgttttattataatatgaaagcactaacttgtaaagattcaaactgaccatttaacagtgtctagattgattgttttagcatttgaaattaattttgaaatcggacatctgctgtgtgctttgttaacgattagcttactatcagataatgacagtttttcaatactagcaacagcgttaacttggaaataaaatcccttacctacttgcttttccttcatgagctggcaagtaacatcaacgcgagattttaggtctttgaatcctttttgttctaaaatagcttttatagttgcatttaaacatgttgaccatgctaaagcaattaattcctcaggattaaatcctggtaaatgatttaaagggtgattggtctccacaatttttccattggagagataaacttttccatcaacgccttgagtgtttgatgaggttacttcataaagcataataaactcctttgggtctagtttaccaaatttgggagcattccgacaagattttactatttagaatgagtttcttttcctctgaagtaaaatcctaattgctagccatttgtggtataatggcataaaacataagagaaagaggtaatcgtaatgtcagacgaacaaatcaaacttgtgattgtaacaggtatgagtggggcaggaaagacagtggctattcagtcatttgaagatttaggatattttacaatagataatatgccgcctactctagtgcctaagtttttagaattagcagcacaatcaggagatacaagcaagattgctatggtagttgacatgcgtagtcgtcttttctttagagaaattaactctattttggatagccttgaaattaatgataatattaactttaagattctatttttagatgctactgacaccgagctagtgtcacgatataaagagacacgtcgtagccaccctcttgctgccgacggcagagtgttagatggtatttctctagagagagaactattagcaccgcttaaaagtatgagtcagaacgttgtggacactagtgaattaacaccaagacaactacgtaaggtcatttctaaagaattctcaaatcaagatagtcaaagttcttttcgtatcgaagttatgagttttggttttaaatatggtatacctttggatgcggatttagtattcgatgtgcgttttttaccaaatccatactataaaccagaattaagagataagacaggtttagatactgaggtttatgactatgtcatgagttttgatgaatcagatgatttttatgaccatcttcttgccttaataaagccaatcttaccaggctatcaaaatgaagggaaatctgttttgactgtggcaatcggatgtacaggtgggcaacatcgtagcaccgcttttgctcatagattatcagaagatttaaaagcagattggacagttaatgaaagccatcgtgataaaaataagcgtaaggagacggtaaatcgttcatgagaaaacctaaaataaccgttatcggcggaggaacgggaattccagttattttgaaaagtcttcgcttagaagatgttgagattacagcggttgtcacggttgcagatgatggtggttcgtcaggtgagttgcgctcagttatgcaactaacaccaccaggagatctaagaaatgttttggttgccttgagtgatatgccgaagttttacgaacaaattttccaatatcgttttgcagaaggtgatggggattttgcaggtcatcctttaggaaatcttattattgctggtgttgctgaaatgcaaggttcaacttataacgctatgcagagtttaacacagttctttcatacaacaggaaagatatatccatctagtgaacatccgctcactctgcatgctgtttttaaagatggccatgaagtggttggagagagtcaaatagccgattataaaggcatgattgaccatgtgtatgtcactaatacttataatgaagagactcctacggccagccgcaaagttgttgatgcaattttagaaagtgatatgattgtgttggggccagggtcacttttcacctctattttacctaacctagttattccagaaattaaacaagctcttttagaaactcgggcagaggtagcttatgtatgcaatattatgacacaacgtggtgaaactgagcattttacagacgcagaccacgttgaagtattgaaacgtcatttaggacaagatgctatcgatacagttttggttaatattgaaaaagtgccagagtcttatatggaaaacaatcattttgatgagtatttggtacaggttgaacatgatttttcagggcttagaaaacatgccagacgtgtcatctcgtctaactttttaaaattagaaaaaggtggagccttccatcatggtgacttcgttgttgaggaactaatgaatttagtaggaacacatttatgagttttacagtaaaagtcaaagaagagctgctaggtcataagagtgaaaataagatggaactgtcagctattatcaaaatgtcaggtagtttaggattagctaaccacggccttaacctttctattactacagaaaatgctaaaattgctcgtcatatttatagcatgctagaagaacattatcatttgcagccagaaatcaaataccatcaaaaaacgaacttacgaaagaatcgtgtgtatactgtttttattgaagaaaaagttgatgttattcttgctgatttgaagttggctgatgctttttttggtattgaaactggtattgaacactctatattggacaatgatgaaaatggaagagcttatctcaggggagcattcttatcaacgggtactgttagagaacctgattctgggaaatatcaactagaaattttttctgtttatctagaccatgcacaagacttagctaatcttatgaaaaaatttatgttagatgcaaaggttattgaacataaacatggagcagtaacttatttgcaaaaagcagaagatattatggatttcttgatagtcattgatgccatggaagctagagatgcttttgaagagattaaaatgatacgtgagacacgtaatgatattaatcgtgctaacaacgttgaaacagctaatattgctagaacaatcacagctagtatgaagactatcaataatattatcaagattatggatactattggttttgatgcactgcctagtgatttaagacaagtagctcaggtgcgtgtggctcatccagattactctattcaacaaatagcagacagtttagaaacgcctctgagtaagagtggcgttaaccatcgcttacggaaaataaataaaattgcagatgaattatagaaggagatattcacatggcttgtacaacaatattggttggtaaaaaggcttcttatgatggttcgactatgatcgctagaacggaagactctgttaatggcgatttcacacccaaaaaattaaaggtaatgacatctaaagatcaaccgcgtcattacaaatcagttttatcaaattttgaagtagatttaccagataacccacttccttatacttcagtaccggacgcattgggaaaagatggtatatggggtgaagccggtattaacagtaaaaatgtagcgatgagtgctacagaaactattacaacgaattcccgcgttttgggtgcagatcctttggtttcagatggtataggggaagaggatatactcactttagtgcttccctatattcagtcagcgcgagaaggtgtggagcgtttaggtgctattttggaaaaatatggaacctatgaatcaaatggtattgctttttcagataccgaagaaatatggtggttagaaacaattggtgggcatcattggattgctcgtcgcgtacctgatgatgtttatgttactaatcctaaccaactaggaattgatcattttgaatttaataactgtgatgactacatgtgctctagtgatttgaaagagtttatcgaacaataccatttagatttgacctattctaatgagcatttcaatcctcgatatgcttttggtagccaacgtgataaagatcgtcattacaacacaccaagaagttgggcaatgcagcgttttttaaatcctgaaattgaacaggatccacgtagcttgtttattccctggtgtcaaaagccttaccgaaaaattactgttgaggatattaaatatgtgttgagtgatcattatcaagacagtgtgtatgacccatatggaccagaaggggatgcggtaagtaggagagcttttcgttcagttggtatcaaccgaactagtcaaacgtctattctacaattacgaccaaataaatcacttgaaacgacaggtgttcaatggttatcttatggctctatgccatttgcaaccatggtgccgttgtttacacaagttgagactgtaccaaactatttttcgaatacaaccaaggatgcttcaacagataatttttattggaccaatcgtttaattgcagctctagcagatccacacttttatcaacatgaagctgatattgaaagctatatcgagagaacgatggctcaaggacatgcacatattaacggtgttgatagagaagttgctgagaataaagagattgattttcaacagaaaaatcaagaaatgagtgactatatccaaaaagaaagccaagaattgttaaatcgtattctatttgatgcaagtaatttaatgacaaatcgcttttcaatgggagattaaaaaactcggaatattttccgggttttttaagataaaaacgcttgcataagtatataaaacttgcaaaaaaaaaatatcgtgctatactttactagtaaaatattaaccggtaaataacgggttaaataaaaaggagaaaaaatgagaaagaaatttcttttattgatgagctttgtagctatgtttgcagcttggcaacttgttcaagttaaacaagtttgggctgatagtaaacttaaagtggtaacaactttttacccagtttatgagtttacaaaaaatgtcgttggtgataaagctgatgtatctatgttaattaaagcaggtacagaaccgcatgattttgaaccatcaactaaaaacatcgctgccatccaagattcaaatgcttttgtttacatggatgataacatggaaacttgggctccaaaagtagctaagtcagttaaatccaaaaaagtaacaactattaaaggtactggcgatatgttacttactaaaggcgtcgaagaagaaggtgaagaacatgaaggacatggtcatgaagggcatcatcatgaacttgacccacacgtatggttgtctccagaacgtgcgatttctgttgtagaaaacatccgtaataaatttgtcaaagcttatccaaaagatgcagcttcatttaacaaaaatgcagatgcttacattgcaaaattaaaagagcttgacaaagaatacaaaaatggtttgtcaaatgctaaacaaaagagttttgtgactcaacacgcagcgtttggttacatggcgcttgattacggtttaaatcaagttccaattgctggtcttactccagatgcagaaccttcatcaaaacgtttaggcgaattagctaaatacatcaagaaatataacatcaactacatttattttgaagaaaatgcttcaaataaagttgctaaaactttagcagatgaagttggcgtgaaaacagctgtgcttagtccacttgaaggactttctaaaaaagaaatggcagctggcgaagattacttctcagttatgagacgtaatttgaaagttcttaaaaagacaacagatgttgcaggtaaagaagtagctcctgaagaagataaaactaaaacagttgaaacaggttactttaaaactaaagatgttaaagaccgtaaattgacagattactctggtaattggcaatcagtatatcctcttcttcaagatgggacacttgatccagtttgggattacaaagctaaatctaaaaaagatatgactgctgcagagtacaaaaaatattatacagcaggttacaagactgacgtagaatcaatcaagattgatggtaaaaaacatcaaatgacctttgtacgtaatggtaaatcacaaacatttacatacaaatatgcaggttacaaaatcttaacttataaaaaaggtaatcgtggagtacgttatctctttgaagctaaagaaaaagatgctggtcaattcaaatatatccaatttagtgaccatggtattaaaccgaataaagctgaacacttccatatcttctggggttcagaaagccaagaaaaattatttgaggaaatggaaaactggccaacatacttcccagctaaaatgtctggacgtgaagttgcccaagaccttatgtctcattaatatttaaaagatgatatcggatacgatatcatctttttttctttgtacgtgataggctcaaacatagaaaaaagcacttctaatagaagtgcttttaaaattaatgctatgcttattgagcagcgtttgcgtctttgagaccatattttttgttgaaacggtccacacgtccatctgcttgagtgaatttttgacgtcctgtatagaatggatgtgaatctgatgagatttccacacgaataagtgggtaagtttcaccttcgaattctactgtttctttagttgatttagttgaaccactaaggaatttgtaacctgtagttgtatctaagaaaacaactggacgataatctggatggatgtcttttttcatctttaaaaatttcctttctgccataactcgtctgagtcatagttattaaccactctattctatcaaataagaatagtcttgacaagtgttttgataaaaaaagtaaaattataaagaaagtatttcctggatttcttggtaaatagcttgattctcttccaaactataagaattagctccgctggctaaaggatgtccgccaccattatgacgtttagctatttcattaatgatgtgtgacttactacgtaggcgcacacgataatgcccatcgctttgttcaacgaaaattgcccaactttctacaatatcaatttttccaggtacaccaacgattgcagcagtctctgcatctgttacatcgaagcgttttaggtcttcttgtgttaaagtaacgcatgcagcgccgttcttgtcaattttaagttgctcaaaaataaagccttgtaattttgcaattttgaaaggaaaggaatccatttgacgtgccattgcagaaaaatcaaagtcaaattcacgaagtttgctagcaatcttcagtgttttacttgtggtagcaggatataaaaagcgtcctgtatctcctacaataccattatatagaactcttgctgcacttgttgataacaacaaatcacaagaaagagcaaagtctgtcacaatttcacttgcactagaggcgttagtatctacataagagagatctccatagacttcatcgtttggatgatggtcaattttaattaaaaagtcaccttttttataacgttcatcatcaatgcgtggggtatttgctgtatctgtaacaacaacaagagcgccttgatagtcttggtcggtcacttgatccattttagcaatccaagcgagagtgggttcgtcaaaaccagtagcaagtacttttttctttggaaaattatgcctgatgatatcccttaagccgatttggctaccaagagcatcagggtctggtctcatatgtcgatggataatgatggtgtcgtactctttgattttatcaagaatttgttgaaaaataatcattttttacctacctaactgttttgtcttttagtgaagaacaaggctatattgttgactatattatagcttaaatcttttattgaggaaagaaattaagatagcggtcacaatgtttgtttatttttatatgatggtatgttatttttttataaaattcggatactgctaactaataatcttttttataataatattttgtaaatgtattgctttttagctaacttttgttaatatagtaaaaatgctttttaataggagataaattatgacacaagcagtattaaaagaattggctaaggcggagttgcattgtcatctagatggctcactttctttaccagctattagaaaattggctaatatggctgatataatactgccgagtagtgataaagaattaagaaaatatgttatagctccagctcaaacagaaagcttggtagattaccttaaaacgtttgagtttatcagaccgcttcttcaaacgaaggaagcattacgttttgctgcttatgatgttgctagacaggcagctttagaaaatgttatttatattgagattcgttttgcgccagaactctctatggataaaggtttaactgcaagtgatacagtccttgcagtcttagaaggtttagcagacgctcagaaagaatttaatatcgttgcacgcgcccttgtttgcggtatgcgccaatcgtctcataaaacgaccaaggacattattaaacacattgttgatttggctcccaaaggcctggtaggttttgattttgcaggtgatgaattttcctatccaacagatagtttagtagatcttattcaggaagtaaaacgctcaggttacccgatgactttacatgcaggtgagtgtggttgtgctaagcatattgcggatagtttaaatttagggattaagcgtatgggacatgtgacagctttaacaggacagagggatttaataaagcgatttgtcgaagaagatgctgtagcagagatgtgtttaactagcaatttacaaacaaaagcagcctcaagtattcaaagttttccttatcaagaactttatgatgctggaggtaagattacaattaatacagataatcgtactgtttccgatacaaatttgacgaaagaatatagtcttttcgtaacttattttggaacgaaaatagaagactttcttgttttcaatcaaaacgctgtgaaggcctcctttacaagtgattcagagaaagatactttactacataagctacaagaaaactatgacagctatctaaaataaccttcacgattctttaaaaatatgatagaatagtggtaatttacaagtggaggaagatatggctttagcaaagattgtttatgctagcatgaccggaaatactgaagaaattgctgacattgttgctgataaattacgtgacttgggtctagatgttgaagtagaagagtgtacgatggttgatgctgcagattttgaagatgctgacattgcaattgttgccacttatacatatggtgatggagatttaccagatgaaatcgtggacttttatgaagatttagcagaggttgatttatctggtaaagtttacggcgtagtgggttcaggtgatactttctatgattacttctgcaaatctgttgatgagttcgaggctcaattcgcattaacaggagcacaaaaaggtgctgattgtgttaaagttgatttagcggcagaagacgaagacattgaaaacttagaagcttttgctgaagaaattgcttctaaacttaactaagctaccaaaaagacgaacacgagtcgtctttttaacttttttaccatcttttgtaactagaatatgagatatagatatggaattagaagagattcgtcaagaaatagatgaaatagatcagcaattagtaagccttttagaaactagaatgggtctaattttagaggtcatagcatttaaaaagaaacatcgacttccagttttagataataatcgtgaaaacgaagtgcttaacaatgtattgaagaaagtccaaaaccatcaatttgacgatgtgatacgagcaactttcaaagacattatgacagaatctcgtgtttatcaaaaggagaatattgtagacggtgattaaacgatttgataattatgctcagtacgtacttgttttaggttttagcttactaattggtggtgtggttggggctattacagcagtctttggacgtgttctattattcctgacagcctttagaagtgattatatagcttacctactcccttttcttagcattgttggtttatttatagtttttgtctatcaaaaatttgggggtaagagtgttaaagggatgggattggtatttgaagtaggtcatggtaatgaggagactattccgaaacgtcttgttcctctcgtgatattaacaacttggttaacccacttatttggtggtagtgcaggtcgtgagggggttgctgtacagattggggctaccgtttcacactactttcaaaaatattgccgtttacaaaacgcttctcaacttttcctagtaatgggaatggcagcaggttttgctggtttatttcagactcctttagctgctactttttttgcgattgaagttttggtagtaggtcgtttaatggtttcgtatgtattaccaagtttaattgctgccctgacagcaaatttcgtctcacattctttaggtttagaaaaattttctcatagtatagcaacatcaatggcgttaacaccagatattattctaaaattattggttttaggactatgttttggtctgtgtggtaatttatttgcttatttattggctaaagctaaattaattgcttctagtaggttgctaaacccatataaacggattttcacacttggattgttagctacttttttattgtttatcttccattttggacgatattcaggactgggaacaaatctaattgaggctagcttcactaataagaacctttatgattatgattggttgttaaaattgtgtttgacagttattactttggctgcaggttatcagggaggagaagtaactcccttatttgcaatcggagcaagtttaggagtgattattgcgcccattttaggtttgccagttattttagttgctgctttaggctatactagcgtttttgggagtgcaacgaatactctgttaggtcctatcttaataggaggcgaagtctttggctttgccaacactccttattttgttattgtatgtcttgttgcttactccatatcacatgctcatacgatttatggtgctcaatctagatagttagtgatgagttttaaaagagtttatcagtttgtagaacggaatattccgttctcttttttattctcttaaagtttataaaaatggagtttgtcaattttatgaatgcaaaaattatgtggctaatataatttcttcaaagaaattgattttatgattgtcattaaaatactgtaaaatccaattgaatgtgtaggaacttaggttaggataatgtctacaagcatttaagtcgcgatggtgaaatgcattataagataaaaagttgatgtggatttcaactttatgggaaagagttaagtgacacgaaagctaatatagaaaacgtagcttaaaaaatcaaatattaaatgaattaaactctcaaaaatcagaaaaaagctaacctagaaacagtaaatcaaatttaaataatagacttcctgcgaaacaaaatatggtacaatagttctatgaattatgaagcaagcaaacaattaactgatgtacgatttaagcgccttgttggtgttcagcgcactacttttgaagagatgttagctgtgttaaaaacagcttatcaacgtaaacacgcaaaaggtggccgaacccctaagttaagcttagaagatctcctcatggctactcttcaatacatgcgagaataccgcacttatgaacaaattgcggctgattttggcattcacgaaagcaacttaatccgtcgaagtcaatgggttgaatcaactcttattcaaagtggttttacgatttcaaaaactcatcttagtgctgaggatacggtgattgtggatgcaacagaggtaaaaatcaatcgtcctaaaaaaatcaactagcgaattattctggtaaaaagaaatgtcatgctatgaaggctcaggcgattgtcacaagccaagggagaattgtttctttggatattgcagtgaactattgccacgatatgaagttgttcaaaatgagtcgcagaaacatcggacaagctgctaaaatcttggcagacagtggttatcaagggatcatgaagatgtattcacaagcgcaaactccgaggaaatcaagcaaacttaagccactaactcttgaagataaaacctataaccatacgctatccaaagagagaatcaaggttgagaatatttttgccaaagtaaaaacgtttaaaatattttcaacaacctatcgaaatcgacgcaaacggtttggattacgaatgaatttgattgctggaatgatcaaccgtgaactaggattttagtttcgcaggaagtctaatatacaaataactattctaaaggatgacaccttgttcttctagataaaatagctttacaagtaggttaaaatttggtagaattgtgagagtgtgtgatggacgcacaaaaaacggctaatccgctgagacaagtacttaagattagtaagagaaggagaataaaaatgaatccattaattcaaagtttgacagaaggtcaacttcgttctgatatccctgagttccgtgctggtgatactgtacgtgttcacgctaaagttgtcgaaggtactcgcgaacgtattcagatctttgaaggtgttgttatctcacgtaaaggtcaaggaatctcagaaatgtacacagtacgtaaaatttctggtggtatcggtgtagagcgtacattcccaattcacactcctcgtgttgataaaatcgaagttgttcgttatggtaaagtacgtcgtgctaaactttactacttacgcgcattgcaaggtaaagctgcacgtattaaagaaatccgtcgttaattttgatgatcagattttaaaaatgcttggttgtttgaggatagtaactatgttttaaaactggacaaccaagacgtaaaaaatctgcctgtgggcagtttttttactaggtccccttagttcaatggatataacaactccctcctaaggagtaattgctggttcgattccggcaggggacatgtaaataacgtcaaaagcctttgtattaaaggctttttgttttattccgattttaaaaggggcacaaaaggggcagtttgtttatttataatttctttcatatttacagttgtgtgactgtaaatagataatgttgtttttggatcgctgtgaccaactctatccattatcgcatttagcggtatccctttttctgctaaaaatgatatatgcgagtgtctaaataagtgcgtgtgataatctccataaattttcaatcgcttattgatgtacgcgtttaaaatcggtacaccgttcgaatttggaaagacgaatgaacttgtctttttctgtctattgacgatatctaaaatattatctgatacagatattttgcgtgttgattttttggtcttggtcgtagtgatttctcgtgtgttaaaatcgtaagttgcattaatcagaatttctttattttcaaaatctattttgtcgtaagtcagacaagataattctccataccgtacacccgtcaaaaacatgaataaaacgatgtctgcgagcgtttgttcgtcattgtctatcattctattgcacaggtcgtaaacctcgttagatgttaaataaagcaccttttcaggcttgtaatcatcctttggtttgggaactaagacgttctccgtcggattacttgtcatatagtccatttgtatcgcataagaaaatatggcatgcaatctctttctacatttatgcgtaacatgatacgaattgtgttttaatagtttatcaatgattagtctaatatcacgtttagtcaacttgttgataattgtatcatctggtaacacggttgctatatgactgtcagatactaaataaccacgttttgtggagtctttgacggtcggtatccattgctttagatattcctttttaagttctccgtaagtcatttctgagtgatttctgatagcgagcctatcttcaatcttttcctgcaatattaaaccagcttttttctgagcttgactagaatttttatctagtgtcacagatacttttttgtacttatttgttagagggtcagtatatctttcgatatatttaaatttcccgttggctagctcctctatccacattgttttatacctcattttctgttaaaataggtatggtaaaaacccctcccaaaaagcaggtttttactatactagaatttgcctcacgctctccttggacaaaatttgagcgtggggcttttttattttgtcttaaacgttcttccacaatttgtgcaatgccagttgtttttaccctttttcccaaccaaacctagcaataagaacggccaagcaattaaaaatccgatacaaccgacacaaccattaaaacctttacggtcttggttcataaattgtacttttgtactttggcagtaaggacaacgctgtgcaaaaaatcccatttttaattctcctaattttgatttcagcttttaacgtggttcagatattacacatagttattaattttcctatttacgtttcgactggggtaaaatggcacgttatacaaaatgacgtttaaataatttatggctttcaatgttctgatcaacatctttctcatcccaaatttgcaactcccaaggatagtagtgattgctcttattcttgaaataaacgtgtattcctgtgtaattatctttatctcgtaaataccagttttttaagtcaaacttatctttccattcatcaagttgttccatcacttgtgaaatatcctcagaagataaaatgatacgagcgccaaaaatgtcattgagaatagaattcacaggataaccatcttgtcttttggaaaaacgttcaattttgtctaagatactttccgatgtttttacgcgatagacataaggaatatccttaacatcagctttcatcaagtaatcattgatagattcgtgtaaattcaagcggtaatctaaaatcgcttgaacaggtacttttgaaaaggtatgttttagattaatcttttcaactttcccagtttcaaaataatcttgcgaataaacaaggtgtattctattaatttccgagattaagcgttcaactttttccagcatattaattctccctgtaaatatctacgacttctcctatcgtgcggatgttgtcgttctctgaaagatagatttcctcatagcttttatttaaactttgcaagtaccaagcgccgtcataatcacgtttgagtttttttacaaagttttttccattgacttggaatatccctatatcattcatatcgacttgactagataccttgacgaacagtaaatcgttatcttgaataagtggttccattgaattaccagctactttcgcaatagtatcatacttatcggggacatcatcagcccgtagtttaacttccatatgtaaattgtcttcttggtatgcccccagaccagcagcaactaacccctcaacgtagtcagtgatataattttctgtctcctcaacttttctatcgaacatagaaacaactttattttgttcttctaattgttcgttagcgaagctaaggactttttcttgtctaggttgttctaattgagaagaagtagaagtgattttttgtagggtagaggaagttagatttttttcagttttcgtttcatttaacgcgactatctgattttcgtctagcgaatttaataaatcatcaaaagagatgccaattgtgtcagaaactttctttataatcggaatagatgggatgatttcttttccgttacgaggatctctgtttttttcaagaatagaaacgtaagctttgctgatgcctgattctttagcgaattcagccatgctcagattattggtatctcgatacttttttatatattttcctagatgcatatcgaattcctttcaatataatgtctaacattttaaacatattatacagtacaaaaaaatttttttcaagttttttgtccaacatacttgacaatcatttgtctaacatgttagactataatcaagcttaaggaattaagcaaaacgaaaggaggtacagctaatgaaatctaggctaaacaaaaagcctaaacacaaagaagtcgagttggaaattcacattctttggtttaagcttaggattcactactcaatagagtggtgacaataccaagagggctaagaagccctctcccctaacggggtaagtttagtttagcacattggctgtatctccgcaagaatgaaaggagagtagatgtggaagaatctatattgaactctaagcgctacacaaaacttgtcgtagagacagaagatggcaaaaaaatagcagaagttactttgacggaagcaacccctgctgatggatacgtgattaggttaacccctaattatgactaacctttaggtgggaatggatcgttaccatagctgttacgttcgcgaattcgtccatttttgccatggataataacttcactgctattgtttttagcgataccagtagcgatttcgacagcttcggcttgggttgttgtgtgtttggtcgcacgactgttgcctgcaccttttatatcccaaccgccattagggttaggtacgacatgttgatttttagccattagcttatcctcctttcgttaaggataagttgattataacatttttaggaggtacaaaatgaattggaaaaaactaatgctaggcgatttagaacacacgtttactagtcgtgatggcaaggaaaaaacaagcgttgaatttgaaggcggcgtattgccagcactgttagtgctaggtggtatcacttggctgatcgcttggcttattacaaaataaaaactcccatgagggagtaggaggaaggtatggagtttatttatttactaattataccatcaatagtttcatttgttgtatctatcttttggtcaaaactagtcttcaaaaaagtagtagaaattatgacaaaaatggatgttgatcaacaagagctgaatgaaacaatgagagctcaaattttagaagaaatcaaaacattacgaaacgtcaggtaaacaagtttttgaaaatctaacaccaaataaagtaagagttatcattcctagatttgttagtactcttttgttttgttcttttaattcactgttctttttagttataaagctattattaagaatgttgtaatattctttctcatctacgtgtgctttgtaattaatttgaattagtcctagtctttctaaattagttaatgatgaactttgaatagctatatcattttgttctaaattatctacgaatacatgactagcaatatgctctaacggcttatcttgaccaattattgtcgtatagtaggtaccagttgcaacgaaaccttttttaaagtataaatctgagataattttgaaattttgtgcatcaattttatcaaactgttttattatctcaataaaagatggatggttgaattcattttttgatttatccatagatgaagcaatcaattttgtaaataaatttctaagttcttcttcttctaaataaaatttagatgcttctaaagccggtccagctatcgaaagactaggttcttgtagattttcaatatttttactaacaacatcttgtatttctttagctaatttttgaataaaatcgtttctgttagtaatgtacttatttcttcgattttcagctatttcatgtaatttttcaaaaccaattaatgtcattaaatcatcaatagctcttgcaggattttcagctttctttatggcagtagttcctaagagagtagcagaaccaagcaaaatcgtctttatatcaagactttcaatcataatacaactccgttttttatttcaattataccacagaaagggggtgggggaatgcaacaatttaatctaaaacaactacgagagaaaaaaggatttactcaaaatgaattagctgataaagctaacgttagtcgttcgctcgtggttggtttagaaacaggttcatattcagagacatctacagcatctctgaagaaattggcgaaagctttggacgtaaagattaaggatttatttttttaactaatcgtctaacatgatagacaaaatatttgttaataaaactaacaaaccgctagaaaggaactatatgaatcaactaataaacatcaccctaaacgaaaatcaagaaccagttgtcagtggtagagatttacacaatgtacttaatataaaaactcaatatactaaatggcttgaaaggatgtcggaatatggttttgaagaaaacgttgactatatagctattagtcaaaaaagactaacagctcaaggtaaccgtacagaatatatagaccacgttctcaagctagacatggcaaaagagattgctatgttacagcgaaacgagaaatcaaaacaggtacgcaaatacttcatccaggttgaaaaagacttcaatagtcctgagaaaatcatggcgagagccttgctcatggcagataagaaaatcactaacttaacgatggaaaataatcaattgcagttagatttaaaagaagctcaaaagcaagcgcgttatcttgatctaatcattgagagcaagggagctttgcgagtaacacagattgctgctgattatggtatgtctgtcaataaattcaataaaacactattagaatttggtgtgcagcacaaagtgaatggacaatggattctctataaacgacatatgggcaaaggttacacagacagtcacacatttgactatcaagacaaaaacggccatacaagagccaatgtgacgacgacgtggacacaaaaggggcgtctattcctgtacgagttgttgaaagacaacaatattttgccactaattgaacaggaagacattgtatagaaaggaaacatatgagaccaaaacaatatccgtatagcggaaataaaaaagaatctattgcggtaacagtagattccaaaacgctagccgagaaactagagattactgaccaatcgaatatttcccaagcgaaacaccgattatttggtctgtaaacaagtagacaaacggcattttgaattcttgatgtgaagatgaaatcaaggtatcagcttagacgaatttagataagaaaaaaagtccgacgggaatcggactcaaaacaaacttaatttacttaattatatcacagaaaggaaacaatatgctagcaaaacttaaaagcggtatcgaagtaccttacgaagagctttggcttaatgataacgacttatccgaatttattggaaagtcatttgaccaaacgcagcgattactaagaaagatgtacaaagacagaaattatcgcaaatacattgacaaggttggcggtcgttcaacaaaagttaaaaaatttgaagaatggagaaaattacaaaatgaaaaaattatttaactttattttcgcaaaacaaaaaagaagaaagaccaaaatggacaattgaaacacatgtctaaacgggaaagtgctatatgacctagcagacgtcaatagatctctacgaacaagtggatcgagaaaaggagtatgatatggaaaatccaatgacaggagtagcaatactagcatttatcgctttacttgcatatctcggcaatcgtaatagcaatcaaaagacaattactaagactgttgagacggtgttagataactaccaagttgtgcgaaaggttgagagaccaaaacgcacggattttatagagttacctaccccaggatcatgcgggaaagtttggggcaaggatagacctttttaaggagtattgaatggcagataacaaaaagtattactatctaaaattaaaagaaaatttttttgaaagtgatgaagcaatcattttagaaagtatgcctgacggctatatctatagcaatattttgctcaagctatacctaagaagtttaaaaaatgacggtttattaatgtttaacaaccttatcccttacaacgcacaaatgcttgcaacgattacaagacatcaggttggcactgtcgaaaaggctattcaaatttttagagacctacaactaattgaaattcttgataatggtgctatatatatgacaaatattcaaaattttgtcggaaaatcaagcactgaggctgacaggatacgaaaactaagagcaaaaaataacagtggtgtacaaatgttgtacaaatgtacaccagagatagagatagagaaagataaaaagatagatataaatatagataaagagttagaactagaacaagataaagaagataggtttgttgatgttgttgaagcaaatcttggtagaggtcttgtaaagtttgagttcgacatgattaatgactatctcattggacaaaatgtctcaaaggatttgtttttggaagctgttaaagtagcagttgctaataatgtccgcaaatttaattacatcgctcgcattttggataattggattaatgatgggataaagactcctgaacaagcatatcaggctcaaagagactttaaagctaaaaaagctaacaaaacaatgcaatcacaatccaacgttcctagctggtctaatccagactacaaaggaccagatttaaaagaatttgcactaggaagcatagacgatatagaagatggatcaggagatttttaatttttttaacaaacaaatcaaaaaagattttggtaaaacggcgagtaaagagacttttgctaagtttgctagttactgcgccgaaggaatcgaaaaaaatggagttaagccaatttttaattggataaacctatacgcttttggaaccggtatgacaacagcagaagcagaccgattaagaatagagcgatataaacaggagaatacgttatgacaaaacaacatagagaaacgcttatctggtaccgagcaagtcatcaagagcgtgagaagctgcttgattttgggctagttgataaatcacagtacgtgacactattgcggcaattgcgcaagaaatatgcgatttaggaagggatatatggttgaaatcagaattaacggtgagtcaatcacatttgatagcaattttagggatgcgcttatatttacggtagatcacctaaaaaattatgacgatccttctttgaggcagacttacaacgagtttaaagattatacagacgaggacttgatgggatatatcagcacagaatttgatgtagacccggaaatgtttgttgatactaattcagacagcagatggaaaattaaacaacgaattttagaggactgactgtgaacgaagaaatatatgagtctagtcgttactggcaaagtagatacagcgacttgatgtctgattatcttaaagaagctgaagaaaatatagagttaaagaaacagttgaagagattaaaagccgaaaattggcagctgaaacacagaaagaggaaatgatatggcttatttatacgaattagaaggtatttacgcacaattacagtcaatggatttagacgaagaaacattccaagatacacttgacagcattgattttcagtcagacttagaaaataacattgagtattttgtcaaaatgttaaaaaatgtgcaggctgatgctgaaaagtataaagccgaaaaagaagctttttataaaaagcaaaaacaagcggaagccaaagcggaaaaatacaaagagacgatcaggcttgcaatggaattgagtcaaaagaaaaaagttgacgctggaatgtttaaggtgtctttgcgaagaagtaaaaaagttgagattttggacgaaacaaaaattcctcttgattacatgcaagaaaaaattgaatacaaaccaatgaaagctgaaatctcaaaagctttgaaatctggaattgatatatctggagttgaactaatcgaaacagaaagtttgcaggtaaagtaaatgaggaaatcagaaagtataacagaatatgctaaagccttttgtaaagctcagctagaggtaaaacaaccactaaaagataaggataacccatttttcaaaagcaaatacgtgccgcttgaaaatgttacagaagcaatcacaacagcttttgccaataacgggatatctttttcgcaggacccgacaacaaacacagaaaacggttatatcgatgttgcaacgcttgtcatgcacacgagcggcgaatgggttgagtacgggcctttaagtgttaaacctacaaaaaatgatgtacaaggcgctggttcggctatcacttacgcaaaacgctatgcactatcggcaatttttgggataacaagcgatcaagatgatgacggcaacgaagatagtaaaccaaacaattccaggcaatcgccaaaagctacaactaaaaaaacacaaaagacaggatatcaaacaccaaaaatcagcaatatccaaatcgagacttacaagtctgatttaaatgatattgcgaaagccacaaaccaaaacgttgaagagttaacaaaatggctaaccgatactttaaaagtgggggaactagaaaatttgcatacggaacacattgtttcagcagacgaattaatcaataaactcaaaaagaaagcaggactaaaaaatgattaacaacattgtactagtaggtcgcatgaccaaggatgccgaacttcgttatacaccaagtaatcaagcggtagctactttttcacttgcagttaatcgtaattttaaaaatcaatctggcgaacgtgaggctgattttattaactgtgttatttggcgccaacaagctgaaaacttggctaactgggcaaaaaaaggtgctttggttggaattacaggtcgtatccaaacgcgtaattatgaaaaccaacaaggtcaacgtatctatgtaacagaagttgttgcggaaaatttccaattattagaaagtcgcaatagccaacaacagactaatcaaagcggcaatagttctaattcttattttggcaatgccaacaaaatggatatttcagatgatgacttaccattctgagtgtttcgctaagcttctctcaatctaacaggtgaaagtcctgtcctaacaattaaccagttcggttaggtagctatggcatacgtatgcggagtaatccaaatgcggaagcaatgccgactaacgttatccccagtaggctgatattcattggtcttatctcagtccgtgggagcgagcaaacctacagtccgtaacgaaagtgaacttccgctaagtgtcgttaaggtcattccaatgagtataactgagagagttggaaatagagttgtcgagcctttagaatgggggcgaagactggaattgttgtcagttctaactggtatatactggcaataaagctctcggcatatagaagatggaatgtaggtaaagatgagcgaggaacgaaagagacccttttctatcatacatatcccatgtatgtaaggttagatataaggaaaacaccgaagttctaattgacgtaggaatagggagtcggagaggttcatagtaccgataatcatacgagacaacaaaactcgatgtagagaaggagccttgcctttatcggtcttaccgatgaaagaggaactagatgattgctcagaaagctataaacatctttgaaaaggttcaagtatttcaacggaagatatatctatcgaccaaggcagataataagcgaaagtttggtgttttatacgacaaagtatatcgtaaagatatcctgaaagttgcgtggttctatgtaaaaaggaataaaggttcggcaggcattgatgacttcacgattgaagaaattgaagcctacggtgtacagaaatttcttgatgaaatagaagaccagttgagaaacaagaaatatcaacctaaggcagtaaagcgagtttatattccaaaagcgaatggtaaaaagagaccgttgggaattccgacagtccgagatagagttgttcaaacagctgtgaaaatagttatagaaccgatattcgaagcggactttcaagaattttcttatggttttagacctaagcgaagtgctaaccaagctataagagagatatataaatatctcaattatggttgtgagtgggttattgatgccgacttaaaaggttactttgacacgatacctcatgataagttactacttttagttaaggaacgagtaactgataagtctattatcaagttacttagtttatggctagaagcaggtatcatggaagacaatcaagtgagaagtaatattttaggtactccacaaggaggtgtcatatcaccgttgttagcgaatatctacctaaatgctttagacagatattggaagaacaatcggttagaaggaagagggcatgatgcccacttgatacgttatgcggatgactttgttattctatgctcaaataatccgaagaaatattatcagtatgcgaaacagcgtattgataagctaggattaacattgaacgaagaaaagacaagaattgtgcatgcgacagagggatttgattttctaggctatacgcttaggaaatcaaaatctcacaaaagtggtaagtataaaacctactactatccttcaagaaaatctatgaaatcaataaaaggcaaagtaaaagatgttatccaaacaggacaacacctgaaccttcctgatgtcatggaaagattgaatccaatgttgagaggatgggctaattatttcaaagctgggaactctaagcaacacttcaagagtatagataactatgtcatatataatctaacaattatgcttagaaagaagcacaagaagtctggaaagggatggagggaacatccgccgtcatggtactataactactttggactggtttgtttaaggaagttgagtaccaatatcaatgatgatagtcagagatatggtagataacttgtgaatggctataacgtcgaagaaagaagatattgggaaagccgtgtaagggaaaaccttacgcacggtttgacgaggggtttctgaggagatggctcaaatcagcgacctactctacaaaaatgacgaagccgaggaaacaaaggatatatgcaatatatgatgacgacaaatttgtcgacgttggcacaaaagaagagttatcggcacggcttggaattaaaaaagcaacaatagaacagtacatgactaaatcatatcaagcgttagctagctcaaaacgaattgcattgttggtagggattgaagaggaatatgacttttaagacagaatttgaaataccaatcgaaccaaaacctcaaactagacctaagttcagcaaatttggtacgtacgaagatccaaagatgaagagatggcgaaaagaggtttctggatggatagaaaaaaattatgatggaccgtttttcgatgattgcataaaggtagaggtaaccttttacatgaaagcccccaaaacgctatcaaaagagcctacacaacgttctaaaggtaaaacaatacaaatatatcagaacttcgtgcgtgagcttatatggcacgctaagaagcctgatattgataatctgattaaagctgtttttgatagtatttccgatgcaggttacgacagaatacagaaatcaggtatcgtttggtcagatgacaatatcgtatgcgatttaagagcaaagaaaaaatacagtcagaatccaagaataaaagtgaggattgaagagattgacagatgaattaataaatcaattttacaaaatttttgacaatgggattgtaaggcaaattaaaaagctagatgtagattgtaaaaaagccgagcaaataagatgtagcgttacaaataacagacgtcgaaaaaccctgccaagaccgtacgttatcgaagcgtttaaagattattttgacgaagatacctatgcacagatgtatatcaaatcatatcgtgagtatcacaacccaaatgaccacgagacggaactttttgtaaaactaaaaagagcgcacaaagatactaagttagagcattacaaggaagttaagcgattgatgtacgcagcaatgaccttttgaggaggtatagcatggcagataaaataaacgcagagagtatgcaagctgcatacaacgaaaattatcaaatgtttttagctaaaaatgcggattatggaaattcgttcgaaaagtctttggatgacttcggatttatcgctggtgtcgtccgtataagcgataaatacaacaggttatataatcttataaacagtgacaaaaacgtctcagaaagcctgtcagacacgttaaacgacatggctaattattgcgtgatgttagcggtttggttggaggaagaggaacgacaccgaaatttagagcatgggggataaccgatgttaattaataaaaatttagtaagagacattagacttgctatcaatgaatacgatgataattatgacgaagataacgcagaagtttgtatagaagtcattagacgattgattgaacaggaggaattctgatgataccgaattttagagcgtttaataaagagaccaaaaagatgtatggtgttgacggctttgaattaagtgtgcgcaaaatatatagatgcagcttagcagatgatgagtttcgttgtggtcgcttagagacgtttcattttgtcgaggataactttgacgattatatcctcatgcaatcaacaggaatgtttgacaaaaacggtgttgagatttttgatggtgatatagttttaacaacacgtctcatagattacacatataaaaattttaaaggtgtagtaaaaatgttagaaggtcgctggttaattgacacaggtaaagatgcggttggtttgtggactgaagttgatgagaacgaagcaatcggaaacatatatcaaaacagcgaattactagaaagcgtggaagaatgacaaaagaagaagtaattgcatttctgacagaacagcgtgatttgcggcttgttggatatgagtggggaaaagacaatctgtccgtttttgcgagatggcaattagaacaagcaaatatgtatttagatgtcattgagtggatagaggagatgacgaaatgactgaacaacagatgattgattgcttgctttatgagttagcaaaaaaagacaaattgaacattagacgaaacaatatcataacgtttttatcgattgtgctgatggctatatctattttaaacgtcgcactgcaagaccactacaagtcgcaaattacagaattacggacacagttaagcaggacacaaaagcagcttaaacgtgctagtgatgatagagctagacagacaaaacggattgctgagctgactggaaatgggggataaagttgtcattaattgatgaagtaaaagaatgcggttcagaatctcacaaaaaatggtttgataggtactttgatggtttaaaaatcgaggagaaacttaaacagtctgcgatgaaaggattctctggttataaaatctctattccaaaaaatgatgaatacttagctagacgacttgatagccaaaaaacaatagatttactaaaataccgacttggtgacggttttgatgtcgaaataaaaaatcttgaatcatcatataaaatctttggtaaaccagttgtactaagtagagatttatttattttttggaggacaggagataagaatggatgataacacagcagttgttttgatacttttaatattatttttaccgtttattatcggaagttttagagattaagcgaggtaacaaatgaatattgaagacattgaacgtattatttcagaatatctaatttttaggtctgacattgatggttgtgcagtaattgacattgaagattttttaaagcatattcgtttttcgtatgagcgactaaaatagcaaggataatcatgtttataaatgggtaaatgacaaaaaaggttatagaattgagtacaatgaatgcagtgaagtatttttggaggtagcaaatgaatattgaagaagcgaagaaattgatagacaaacagtctattggtaaaggtggtgtcggcgacattccagtagtgaaaacacatattgtaaaagtattactcgaccagattgaccaacctcaaccagaagtgccacggtttgtggctgattggtacgagaagcataaagatagcttagagtgcgatttatatttatatcacatgtcgatatacgatgaagaagtcgaaaaagatgacttctattactggatgcaaacatcaaaaaatccagtctacacacttattaatatgcaccaattcggctacaccatccaaaaagagaagctgtatacggttgagatacctaatccgaatgaaagacagttaagttttgtgctgatgagacaacttagcggaaatgtaagtatcaaagttatgcatagagataacttagacttactaaagacagataatgatttacaactaacagaatccgaaatccgcaaagatttcgactgggcgtggcagtttagagaagaggtggtggaatgaaagaaaaaacaatttttatatcaaaaaaatatgcaaatgactttaacaatgacaaatataatttgtcctctggctattattttagaagtggtgaaaaacatgatattgctattgttaaatatggtgaaaaagattatttaaaaaatactgatttagcatatgttgtatgcgataagatcgttgacgcagactctataagcttcgtttatcatggtgaatatgaaacttggcattttaaactattaaacacagaagcaaattaaagtcccacgcaagcgcctaagagcctgcaatggctctgtgggtctacgagctggaatactcgttaaacttaccctggaagctttctgtaagtattcagctagcagatttggaataattagtctgctagttatagagcgaaatttttagaaagggaaatatcctccgacattttttcgtaaaaatctaaagtctgttatcgctcacagatgattatacaagcgtaatgctgcaaataaagtgctgacgcaaaactaaaaatttaatactcgacaatttaacaacaaaaataagtcagcagagaaatgaaaggagaacaataaaaaagccagctcacgtaagccagctccaatatatttgtctactaatattatatcataaggagtagcttgatgggtcgtaatcagacaaaagctgacattttattaaacgaattaagaataatcccaaaacttattaaagagcttgaacgtgataagattgcgagcaactcgctgctgtcaagtcctcagtggtcagacatgcgaacgagcggagggattagacaatcacaagaagataaaaacgtcagcttgattagtaaatgtgagtattacaacggacaaatacagacactagataaacgtaaaggcgagattgtcgaattaattatgcgtatacctgacatgctgcaacgtcatgtgttaattactacatttgtaaattgtcagacgtacgacgaagcgatcgacagattagagatgaatcgcaataactactatatgcttaagcgaaaaggtgtagaaagtctgaatttgatactaaataatactgaataatactatatcagtattagaaatgactgaataatactcacaaatactaatcaatgtcatataatagtattatcaaaatagcaagaagagataatcatttaccaactgactatttatttagtcgtcaactttaactactatcaaacttgctattttatgtatgtgggacgtacaggttcgaatcctgccgtctcagtagtggttatttcagccactagagcaatacagcgggcgtgggacatggatcggagttttaaccgtttttttgtgtagacctagtggtattaatcacgttcgattcgtgatgggtctataggcttactttaaaaataagcactggtatctctacggggacctttgcgccaagtaagactaaaccgttggaacatgaaccgtgattggaaaacggtagaggtagcgccttgataattggattgtcgacggtctgattatatgtgtcggttcgattccgactgttcctatagcgtgtattggcaacaaggttcaattccttgtgatgtaagtagctaacatctaggcgaagtggttcgaatccactcacacgctttactcagtcatcacattgtggtggctttttattacaattgtaagaggggatgttgcaaactgcgtgcagataaaaaaggtacccaccgggtcgcgttcgaaaaaaataaacgccggctgctaaaaaccgcccacctatgcggtatctgtggccggccagtagataagtcattgaagtatccacatccgctaagtgcagcaattgatcatattgttcctattgcaaaaggtggtcatccgtcatcaatagataacttacagttaacacattggcaatgtaataggcaaaagtctgacaagttatttatcaatcagacagccgtacgggctactgttgtaggaaatagaaacttacctcaaagccgagactggtcgtcctacgcatctaaagaataaatatgatgatttatattaagaagacttaaaatcgattagaattgattttaaggggcatatagaccctatcggctatgtggccgagcttcacgccgtcactgtacattttttctcgcgttaggatttagaattttttaaaggttggattatattgaaaaagaaatgtttaatttgtaaaaagactttccaagctaaaaccaacagaagtttatattgttcagaagaatgccgcaaaaagggcattcgtgagaaacaacgcaaattgatgaagcaaaaacgagccgataaaaagaaagagaaaattaaggttctaaatactaacgcagatgtgacagaaaagcctaaaaaaatacgtaatttggtacaacactataaaaaactaaagagggaaattttagacaatgagtctgaatttggttttacaggaatcgcgcttgttgagggtatagatattcacgaagaaaactttgtagatttagttatgcaaaaaataaaggagcaacaatgaactatatgggtatgggctatcttcagaggaagttagctctttttaagactggtgtagataaaagatatcgctattatgctatggacgacagagacaacacacgaagtattgtcatgcctgacaatgtgcgtgagatgtacaggtctgtgattgaatggaccgctaaaggagttgatagtctggcagatcgcattatttttagggaattcgctaatgatgattttaatgcttgggaaatttttaaagctaataacccggatatcttttttgatacggctattcaatcggcgctaattgcatcttgttgctttgtgtatattatgccagggaaggaagatagcctgcccaaaatgcaagttattgaagcgagtaaagcaacaggcattcttgacccgactacatttttgctgacagaaggttatgcagtcttagagtcggattcaaatgagaaccctacattagaagcttattttacaggcgaaaaaacctggtactatcccaaagatgagaaaccatatagcattgataactcgacaggacaccctttgcttgtccctgtaattcataggccagatgctgtacgtcccttcggacgtagtcgtataaccaaagctgggatgtatcaccaaaaggccgccaaacgtactttagagcgtgcggaagttactgcagagttttatagtttccctcaaaagtatgttctcggaatggatcctgatgcagaacctatggaaaaatggcgtgctactgtttcgacgttattagagatatcaaaagatgaagatggagacaaaccaacagttgggcaatttacaacagcaagcatggcccctttcatggatcatttaaaaatgtacgcttcattattcgcgggtggctctggacttactcttgatgaccttggtttcccttctgacaatccatcatcagtggaagccattaaagcagcgcatgagaatttaagagcggcaggacgcaaagctcaacgctctttctcttctggttttttaaatgtggcttatattgctgtttgtttgagagatgatttcccttatcttcgtaatcagttcatggatactgaaattaaatgggaacctctttttgaagctgatgcaaatatgctaactttggtcggtgatggtgctattaagcttaatcaagctattcctggtttcatggatgcagacgttattcgggacttaactggtgtaaaaggttctgacaatccaattccaaaagctacggaggtgacaactgatggttgatgatgtcttacctaagctactaaaatctgttcaacaggattttgaaaagcattttggcaaaagtgaggtcgttgctaaggcttttgcagaattgcaagctaaaaaagcgacttataagacagtcaacgagtttgctgtagaggttggacggcttttgtcgttggctctggcaaactctgttatttctgatgagttaccagatggtaaaatgtattataatattgctaatcgtctcgtgaatgatacactgagacataattataagttaatttctgattatgcaggcgatgtccagcaaaatttaaacaaacaggctaaaattagtttaaaaattcaacgtccaccgcttaatcaagataaaattgacgggttagtcaatcgtttggcgagtgaacctgtatttgacgatgtcaagtggcttctcgatgagccaattgttaattttagtcaatctatcgttgatgattgtatcagagctaatgctgatttccactttaaaacgggactgaaaccaactatagaacgtatatcaacaggtaagtgctgcgattggtgtgaccgattagctggtcgctacgtttaccacgaagaaccaaaagatttttacaagaggcatcaacattgtcagtgtgttatcgactatcatcctaaaaacggcaagcgtcagaattcatggtcgaaaaagtggacaaaagaaactactgatatactagaacgacgcaaacagatgaatattgacatcagagacaataaccgtaagtctgatatcaaagaatataaggaaatagtatccattttaggtacaaaagcccctatttctctagctaaattccaagacttgaagtataatgatggtataagatatgagcgattaaaagaccaagcacacatccaaggaaactttaaaaacggaagttggctagataaggtaaatcctgaaaaacaagctcggcatatcaaatcaaccgctggagaaggtaagagttatttcttcgatgatgtggataccgatgttttataccaaaagtataaacagactggtgaattaatcaagaatagaaggggacggactcataaggaacttattgatttaccagaagatatttcgataggtattgatatttactcaggaaatttagtaaatggcctgactattcattacggaaagaccggatcgcacattgttccaacttatcatgaaaggagagagtaatggaattattgcagtacaataataagaaaatttcacttgttgacattgatgatgagatatggactggaacagcatactattgcgatgctgatacaaatgagacccccgaggacgtcttagtcgtaaaaaacgagagaggatatacagaaatttctgaatcagaaatcaaatcaattgaaatcatttaataagcgcttagctagtgttgcaagtgctttttttatgctcgaaacaaggaggtggtttgtctcccagcgagagggttatcatgcagtacgattgaaaggaaaaaagtatggttactaagacgaaagcaaagcttggcaatcagcgacctactcaatcggtaaatttacattttgctaaaactctagctcatgaagccatcaattactacaaaaaaacaggtctaagttgctacttgtggcaagagaatatgctcatacctatgatggctatcaacgaagataacctgtgggtgcatcaaaaatacggctacgctattcctcgacgaaacggaaaaacagaagtcgtttacatacttgagctgtgggctttgcataaaggattgaaaatcttgcatactgctcacagaattagcacttctcactcttcgtttgaaaaagtaaaaaaatatcttgaaatgtcaggatatgttgacggagaagattttatatcaaacaaagccaaagggcaggagcgtattgagtttaaatctagcggttctgttatccagtttaggactaggacatcaaatggaggtcttggtgagggatttgacctactaattattgatgaggcgcaagaatacactgccgagcaagaatcagcgttgaaatacacggtaactgatagcgataacccaatgactattatgtgtggaacgccaccgaccatggtatctactggtacagtctttgaatcttatcgtaaagagtgtttaaaaggtgacagacgctactctggatgggcagaatggtctgttgacgaaatgcaaccaatacatgacgtaaaaagttggtatgttgccaacccgtccatgggataccacttaaatgagcgtaaaattgaagctgaattaggtgaggatgaaattgatcacaatatccagcgcttaggatattggccgtcatttaaccagaaatcagttatatctgaaaaggagtgggctaaactaaaagttgagcaagtaccagaactcaaaagtaagttatttgttgggattaagtttggccaagacggtaacaacgtatcattgtcaattgcagcaagagcatcagaaaataaagtatttgttgaggctattgactgtttatccgttagaaatggaactcaatggattattaactttttgaaatcggctgacattgctaaagttgttgttgatggcgcaagcggtcaagaattacttgctcaagagatgagagagcatggtttaaagaaaccagaattgcctaaagttgctgaaattatcacagctaacacgatgtgggaacaaggtatcatgcaagagactatctgccacaacgaccagccatctttgacagcggtagttacaaactgcgaaaaaaggcaaattggctcgaatggtggttttgggtataaatcgctttatgatgatagagacattagcttaatggacagtgcattgcttgcgcactggatttgttacacaacgaagccaaaaagaaagcaaagaaccagctgttaaaaaacgacatccggaagggtgtttttttactgctaaaaaatctaccgaactgccgggaaagcaggagaaaggacgttaatatgtcagaatttaaagttattgaaacacaagaagagttggacacgattgtgaaagctcgcattgctcgagaacgtgagaagtatcaagattacgaccaactgaaaactcgtgttgaagaactagaaaccgaaaacagcagcttacaaactgctttgaatgatgctaaatcaaacactgatagctatacagagaaaattaccactttggaaaatcaaatcgctggttatgaggcagcaaatttacggacaaaggtagcgttacagtatggcttaccaatcgatttagctaatcgtttgcaaggcgatgatgaagacgggctcaaggtggatgcagaacgcttagcatcttttatcaagccgtctcaaccacaaccgccaacaaagtcaaatgaaccgattattaccgaccaaaaagaagcaggttggattgaaatggcacgtaatttagttaacaaaggagaataaacatggcagaatcaattaaagcaggaacgttatttaaaccagaactagtaacagaaattatgagtaaagtgaaaggtcactctacgcttgcgaaattatctggtcaaacaccaatcccgttcaacggagtagaacaatttgttttcaacttggatggtaatgctcagattgttggtgaaggtgagcaaaaattagggaataccgcaaaggtcacttctaaaattattaaaccgctgaagtttgtttatcaggcacgtatgactgacgaatttaagtacgcctcagaagaaaaacgattgaatttcttaaaacattatgctgacggttttgctaaaaaaatggcggaggcttttgatattgcagctattcatggccttgaacctcgcacaatgacagatgcctcattcaaagctacaaactcatttgatggggtcgtgactggtaatgtcatcaaatacgaagcagataaaattgacgacaatattgatgcagctgttacaacgattgtagcaaatggaaatgatgtgacaggtatcgctttgtcaccacaggcaggacaagatatgtctaaacgaaaagataaatttgataatgtgatgtatcctgaatttcgattcgggcaacgtccaagcaacttctttaatatgactttagacatcaacaagacacttactatgaaaggtggcacagctaaagatgaccatgctattgtcggagatttccagaatatgttcaagtggggttatgctgaaaatatcccaatggaaatcattgagtatggagacccagatggctctggacgtgatctaaaggcttataatgaaatcctgctccgtacagaagcattcataggatggggaattttagatgagaaagcattctctcgcgttgaggtacaaggatgatttatagagacaaaaacacaggagcagtagtcgttactgactgtgcgctgttaggcgactgggagattgttcctaacacagtagataagacaccgacaagtgatgaaaaatcttggaccgttcaaactctgaaagaacatttgacagggctaggaattgagtataactcgtctgctacaaaatctgagttattagaattactccctaaataagaaagggaagtttatgacaaattttgcgacaacagatgacgtcattttattatggcgtcaattatccgttgacgaaatcaagcgtgctgaggctttgttagagactgtctctgacacgttgaggttagaagcaagtaaagtgggtaagaatctagatgaaatgattttggaaactccttactttgctactgtattgaaatcggtaactgtagatattgtagcgagaacgctgatgactgctacacaaggtgaaccgatgtcgcaagaaagtcaatcggcacttggctacacttggtctggaacttatttggttccaggaggtggtctttttattaaggatagtgagttgaagcgtctcggactaaaaaaacagcgatatggaggaattgagctttatggggaaattgaaaggaataacagttactttagtcgacaagacgattagcggaaaagaccctttcgggaacccgataaaagttgattttgatattaaaattgagaatgttcttgttgcaccggcaactaccgaagacatcaccaatcagttatctttgaccggaaaaaaagttgaatatatcttggcaattccaaaaggagataagcatgattgggaggataaagaggtttgcttttttgacaaaaagtggcgcactgtcggcctagctcttgaaggtattgaagagcttattccgcttgaatggaataagaaagttatggtggaaagatatgagtaagtttaaattcaagctcaataaagctggtgttgctgaattgatgaaatcatcagaaatgcagcaggtattaaccactaaggccacagccatcagagaacgttgtggcgatggttacgcccaagatatccatgtcgggaaaaatagggctaatgctatggtcagcgctaaaaccataaaggccaagaaagataactcaaaaaacaacacattgttgaaggcggtgcgatgattgattgaagtaattatcaaaaaatatttagacgagcatttagatgtgccgtctttttttgaacatcaaaaagatgaacctgcacgattcatcattttagaaaagactagcggggctaagcaaaatcatttgctaagttccacgtttgcttttcaaagttatgccgaatcgttgtatgaggcggctttacttaatgacaaagtaaagcaagtaattgagcagcttgatgtcttgccacaagtttctggtgtacatcttaacgctgactacaattttacagatacagcaactaagcgctatcgctatcaagctgtatttgacattaatcattattaaggaggaaatatggtagcaaattcatcaaacgttactacggctaaacctaaaattggtggtgctatttatactgcgccgctaggaacagaattacccaaagacacagcatcagagttaaatgaagcttttaagtcattagggtacatttccgaagacggcttatcaaacgaagataaacgagaatcagaagagatccaagcgtggggtggcgatgttgtagaatctgcccaaaaaagtaaagcagataaatttacatatacattgattgaagcattgaatattgaagtactcaaagaaatctatggcaaagataatgtaactggagaccttaaaaccgggattactgttaaatcaaattcaaaaccactagaggaacattgtttggttatcgagatgattttgaaaaacaatacagttaaacgtattgtaataccaaaagggaaagtatccgaagttggtgaaattaagtatgtcgacaacgaagcggctggttatgagacaacgttacaagcgtttcctgatgcggaaggaaacactcactatgaatatataaaaggagctggttaatgaaaacatcgtcaggttttgaatataagattgaagaatcgcgtttaaaaaattatgaattagtagaggcactagcggatttagaaagcaatccgctgtctttaccgaaagttctacgtttgttgctaggtgaccaagtagaaagtttaaaaaatcatttacgcgctagcgacgggactgtttcgacggaggcgttgatggaagaagtgaaagaaatttttgaaagtggtcaattaaaaaaataatagcccttgccacaatgctaaaaatggacgaagatgctcttgtctgtgatttagctgaaacttatcacatatatgattacaaacagctaccacctctaaaagtagctgttttttctttaggcttgagagaagaatcaagaatcaatcgagttatttcaggtaatagagtctcatttgaaagacgaatactagctgggatgtttgacagacttggaatgctcatttggatgaaaacgacagatggccaaaaaggtaaaaatagaccagaaatggtttcaacaatgtttgataatcaacagaaagatagtgaagttgtttcattcggcagtggcaaggatttcgaagaaactagaaataacattcttgggtttggaggtgatagctgatggctactaacttaggacaagcttacgtgcagattatgccgtcggctaaaggaatctctggatctataagtaagacgttagacccagaagcgtcaagcgcaggtagctctgcaggtagcctattaggaggtaaattgattgggatattggggagtgtcattgcagctgctaaaataggcgaaatggtcacaaaagcaatatcgtcatcaatttcagaaggagcggcgcttcagcagtcacttggaggagtagaaacccttttcaaaagcaacgcaaatttagtaaaaaaatatgcagacgaagcctataaaacaactggcttatcagcgaatgcgtatatggaaagtgtcaccggctttagtgctagtttgcttcagtcgctcggaggggatacggccaaagcggcaaaagtcgcaaatatggctatgatagacatggctgataactctaacaagatgggtacatctatggaaagtattcagtacgcttatcaaggttttgcgaagcaaaattacacgatgttggacaatttgaaactcgggtatggcggtacgcaagaagaaatgaaacgtttgctttcagatgcccaaaagctaactggaaaaaaatatgatatttcaaatctctcagatgtatatgaagctattcacgctattcaagggaaaatagggataaccggaacaaccgctaaagaggcagcaacaacgttcacaggttcttttgaagctatgaaagcagcttcgaaaaacttgttggggaaaatggctttaggtgaggatatcaaaccatcgctaaaagcgctgtttgatacaacaagcaactttgtattgaataactttataccaatgctaacaaatgtttttaaaggatttggttcggttatttcgttaactttctcagagctaatacctaaaattgttggttttatgcaaacaagcggtccgtcgctaatgcaatctggcattagctttattattagctttgttaacggatttctaacagcctatcctgcatttttaacagtggcaggaaaaatatttacagatttcgtatcttttgtaatgcaaagtatacctggactcttgcaagctggggctactctcgtcctgaatctaatagatggaatattagctaacttacctcaaatagcaacttcggcagtatctgtgatatcaagctttatatcaatgttgcaagcaaattacccggcaattttaaaaaaaggttttgaaattttaagttacttagtgcaagggattatagcaagattacctgatatcgttattactgttggaaaactcatagcgattttagcaggagcgatagcaagtaatctacctaaagtgctagctcttggagttcagttactcatcacttttgttaaagggattctgagtgtcataggtaaaataaacgaaacagctaacaatattggtgaaaagcttatcaatgcaatcaaatcgattgatttgttgagtgcaggtagagctataatgcgaggtttcttacgaggtttagaggatgtttggggagatattcaaaattttgtcggagatattgcagggtggattaaagatcacaaaggaccaataagttacgatagacgtttacttattccagccggcaacgcaatcatgcaaggtctgcatcaaggacttgttgataaatttaaaccagttaaaaacttagttaacggaatggccgaagaaattcagtcttcattcggaaatcctcaactagcttttgatatggatactaacgtaaacaatggctttgagcgaataggtactttaaataaaaatttatctagtcaagtgactagtacagataattacactagcggcaatgctgctttgttatctgccatcaaaaatttagccgatagacctattgttgtgtctgcgcaatttgataaaaatgaatttgccagagtcgttgctaagccaatagcagcgagacaaaaatttgacgaacagacagaagaaagactgagaggtataaacaggtggtagattacaaaactgtaagatgtcattttggcgatgtcgaattgactaagtggattactattacagacggctttactgtctttagtggcgcagactacgacccggagctaaaagaaattggtggcaaagatggtagcatttttattggaacgaaaactaagcataaagtaataaaagtcccattctgggtaaaatacaatacaatagaagattacgatgccctacaattggctttatcttctaaaaagcctaagatgttgatgtttagccacatacctggacgctattatttagctgtccaggttggggatttgaactttaaagaaatcaagatgaacggctttggtgagataacgtttatagttgcagatgcatatgctcattcaacgtcatacagacgcattaaagactatactcaagacggaaataaaatgaccttcaagattaaaaataacgggacagcccctgcgtttccgatatttagaattaagcacttgggtgaaaatggctatattggaattacaaatgagactggagcatttgcggttggttctcctgaagaagaagacgggactatcgttcatcgtaacgaaaccctttttgattactcaaaagcgattgcacaagctttagaaggtgcgcccaacgtcgcaaaactcaactatatgccaccaacatttgactcggaattaaagcgcatgcgccttgataatattttaggctctggcaaaggtggagagtatgtagctattggtgctagaggaactacaccgggttacggcgagcatgttggaacacggacatttattattaatcctgactcaaacggcgaatatactctcaatgaacacttgtggtggaaacagatttttattgctaccgcgcaggatcaaaaaggatttttaaagctttgcgtgacaggtgaaaatgatgaattcctctatgggattgaaacttacaaacgcaaaaacggctttgaaacagagtataacttttttgctcttgatgatgatggcgttggatggcgcttttataagcagtttgaattccaagcggatagaaattatcacaatcctttttcgatgaatagaagcagggcggttgagatttttagagaagaagataagtttcgtatttactttaacggtgcgcatcatcatgtaactgttccgtcccttaaaggaaaaaaatctcgcaagatacatcttgcgatggggacatgcagtgatagctctaaatatatcaactacaacctgtttgaaaaagtcaattttgaaaaaatgggagtgtctcattacaacaatattgtcaataagtaccaaccaggggatgaggttatcattaactttgaaaatgacactgtaagtacaaaagatatcgattcaatacaagatgtggtgttaggttctaagatgatttcgattccgccaggagagtcagaactagtcgtacacttgtctagctgggtcgcagcgctacctgatatatcaattgattttgaagagaggtacaaataaatgttaacaattcatggaccggatttaaaacctgtcctttttttggataatgataaacaaggagctttgaactactttaaccacaagtggtatagaaagcaaaagactggctcgtctgtactagaattctccgtttacaaaaaagatttgcttggcgatagcccacttagtcataaatatcacgtactaaacgatcaagcatttgtctcttttgtgcacaaaggtaaagtacaattgttaaacatcatgaaaattgatgaagatgaaaaacaaattgattgttattgcgaaaaccttaatttagagttgctaaacgagtattgtaacgcatataaagcaactaaagcgatgtcgtttgaagagtatctcgtgcagtttgacattttgagctggggggctttgacagttggcacaaacgaagttaaggacaaaaaacttacattggaatggactagtcaagaaactaagttagctcgtcttttgtcaattgctaataatttcgatgcagaaattgagtttgagacaaagcttaatttcaatcacacgtttaagcaactcatcattaatatttacaaagaatacgaggagggcaaatcttatggtgtagatcgtgataagaccgacgtgatattacgctatcaaaaaaatatttctgggataaggaaaacagttgacaagcgccagatttataacgctattagaccatacggcaaaaaaactgttagaggcgagcgcgttatttctaatcctgtaactcgtaaagtcactaaaacggttggttcaaatcgcacgtacttaggcggagaccttaaatattatggtcatacaatcaaaaaagctaacgtacaagctattattaactacgcagtgcaatataatattttgccaagtggaatcatcacgcaactttatttagagagtttttggggtgattcgacagttggtaaacgtgacaacaactgggcaggtatgagcggtggagcacagacgcgtccaagtggagtaaaagtcactactgggatggctcgtcctgcaaacgagggtggaacatacatgcactatgcaagtgtagatgactttttaaaagattacacttatcttttagcaaaacaagggatttataatgtcgtcggcaaaaagaatatagcagactatacaaaagggctttttagagctggtggagctaaatatgactatgcagcagcaggatatcaaagctacacaaatttgatgactaatatccgaaatggtatcaataaagtaactggaaatatcctcaatacgattgataagctgtggcagactcctgtaaagcccataaccgccgtaaacgtcgctagaagagccactaaaacaatacaagctattaatgaggctactaagctgaaagggcgcagaatcggttctggacagtgttatgcgctatctgggtggtatgcaaaaaaattggatggcgcttggattgacagctcgattggtggtattagaggtcgtatcggaggcggtatggctgctgccttaatcggcactgattataactggggtgcatatgggtggaaggtagataaatcacctaacgctggaaacttaaaagctggtggtatttataatgtacgagcaaatcgaggcgctcctttttataccacaggctgggggcatacaggtattatcaagagtgtctccaagaccagagttactgttttggagcaaaactttgttggtcgcatgtatgttgtcgaaaactcatatgacattaactctttcgcatctggattacaaacagtatgttaccctcgtgaaatagcgcaaggtatgtctgttaacggcgcaacaacacagcaagtaagtggtgggacacagatatcgtacgaagaagtcgtacaagaggctcagacagaatcatacgaagaagaacaaatcatctatattgacaactctatctacaaagagtggaaagatgaaaacggtaaagtagagtactatctcaaaaatggatttttgtacgcaccactttcaagagaccgctatccatctgttttaaccggtaatgagacacgagacaactggatacgaaaagacatggaagtcgagactgatagtcaagaagtcttgatgtcaacaggtctaaaagacttaaaagcacacgcatatccagcaattacatacgaagttgatggctatgttgacttagaacttggtgatgttgtgcggatacaggacgacggatacgagccaccgctgattttgacagcacgagtagttgagcaagaaatatccataacaaatcccagctctaacaaaactaaattcagcaattttgtcgaaaaagaaagtcagttagcttctgatttaatcagtgatatgttgcgtctatacgatgagtcaattccatacgaaatcaaactagctacttcgaatggtgtcgcttttaaaaatggcactggtgaatctgtcctaactcctagcttgcaaaagaacgggaaagactatgaagcagtttatttttataaaaatggtgactcgctaattgatatcggaccatcgctaatcgttaaagcaagcgactttaaccacgttttaaatataacagttgaggcatatttaaatgaggaacttgtagcaagcacacaaatatcatttacagacactgaagacggtgctgacgggaaagatggcgcaccgggaccacaaggacctcccggtgtaaacggactgcaaggtccaaaaggtgaccaaggcattcaaggtccagctggtgctgacggtaaagcgacttatacgcatatagcatacgcccttgacgagaacggatcaactggctttagtgtatctgataacgttggcaaaacgtacataggtatgtatgttgatgataatatcatagactcaaacgaccctaaaaagtacaagtggaatttgataaaaggcgcagatggtgctagaggtatccaaggtccagctggtgctgacggtaagacaccttactggcatgtagcgtatgcaaacagctcagatgggacagttgactttagcgtgtctgatagtgcaaacaagcgctacattgggcaatatactgactacgatgcaatagattcaagtgaccctaaaaaataccgctggactgacatggttgggacggttgtcgtcgggacaaacaatctgattgatggtacaaaatcattttttgggactgattggtttacttctgcaacgctagaagacgagaacctctctaattgtcctttcacgcttaaaaaatggattagtgggcaaaaagtgtcgcatgcaaaagatatcatggtcgagcaaggtgtaacgtacacttttagtgcttatgttaaacgtgaggtagctgggaatttatatttttatctttatgatatagcagatggttttattactagcgataccccacgagagacaattataaaaaacgttgactctagtctcagacgttttgaaatcacttttacaccaactaagacaggtaggattagaccaaggttcgcgatggtgtcatcggagcaaggtagtttcagctctggtgggtttatgctcgttaggggaaataaaacaggcgactggcaggaatcagaagctgataaagcaagtaatcttgattcaaaagctgatcaagaattaacccaagcacaaattctagctcttgaagaaagaactgctatagcaagagaaaatgcaattgctgaggctatgcagaatacactcagtgaagttgaaactaagtggaagctttggtatgacttaaatacgatagacgaaaagcaaaaagttgcaaacgacatcgctcaattgtttgatcgtacaactgagtttaaacaactattaggtgaggcaagtgcaagatttagctttatcaacaatgaaacgttgattggtgaagagggcgttgctatcggtgacaaaggcggaaaagcaaagttatttctatcaaatgacagcatttcatttgtgacaaatggtgttgctcagatgacattgacaggtgataccttaacaataaaaaatggactgtttacagagcgtatacaaattggaaattttgttgaagaagtctatgacagaaatccattatttaatgttatcagagcaattagaaatagttaggaggtgagacatgggaactgctacatatagtaggtcgtgggggaataacctgacacttgaaatattgtctgcttggaataagccaaatatcgcaagtaatacaagcacagtcaatgtacaagtttttttaaaaatgtctagttatggctatatttcaataggtgaaactagacctttaaaaataacagttgatggtagagctgagaccatcaatgttaatccatcgataaattacggacagagaaaactattatttgctaaagattacattgttaatcataattcagatggaaataaaccactattcaatatttcagcatattatccaataaactttagcaattatggtgaagcgactgcaaatcagtctatctcgctacctaaaattaatagacttagtgtatcaagtgctattagtggtgtgctaggtaatgcagtaactatcacaatcaatagatattcaacgtcatttactcacaatttgaaatatgattttaagggtagtacaggtactatcgcaactggcgttggtactagctatttgtggactataccgccaacgtttgctaatttactgcctaatgaattaactggtacaggtaatctgattgttgagacgatggatggatcagcaaagattggtgagacaaaatatactttatcaataacaatacctaatacagctacttataagccaaaattgtcaagtatcactctatctgatacaaatactttaactagtagcattgttagtggaaacaattttgttaggattataagtaaagttaaagttgattttggctcagctattggaaacaacggttcaacaataacaagttataatgctgaaattgtcgggaaaagtaactcaattatcggtaatggtagcgtatttgataaattggacttttttggttcagcaacaatcagagcaacggtaactgatagcagaggtctaacatcagaaccagttgacacaaaaattaatgtcattgattattttttaccaattgttacaagtgcaaaagtagtcaggtctcagcaaaatcctgacattttacaagtcttgccatttgttaagattgcaccaattatagttggtggaatacaaaaaaaccaactcaaaatgtcggtatctgttgcaccatacaatactggtatctatgcagttgatagtggcgcagctacaaatacctggtcaacaatttcccaaatgtcaggcgcccctttaaatcttggcggcacttatgacaagtcaaaatcatggcttgttaagatttcggtgagtgataacctaatgtcagcaacaccaataatacaaccagttgcaagtgagtttgtacttgtaactaaagcaccttctggtgttgcatttgggaaaatttgggaacatggcattattgatgccaaaggcgatgtttatgttgacggtactatttattgtggcgataaggcgatacagcaaaaaccacttgctttaaataatggtggctcttttagacatgacgacaccgacctaaatagcttgcaagacacaggtttttattgtgtatttagaggtgctaatagaccggctggggcaggtcctgggtacgtaacagttgtaagacatgagacagcaaactatgcttatcaacaattttacgaccgcacaaataaaactatatttacgcgcttgctggaaaacggtgtttggagcggttggagtgagtatgttaaaaaagatagcttacaaacgactggctggataacaattggcaacggttttaaatataagcggaaaggtgatgacatagacttgatgtataattttgcttctaatggattacagagatggtctgttggtaatatgccatctggtttaatacctcaagagttgatgtttgcgataactggatggacacttgctccagacaaatcaatccacttacaaatcaatgcatcgggattgattgagtgtataaatcctggcgcttactcaaatacttacagaggtgtcgtgcactggtcaatataacagtcaatataacaaaggagacgatatgtttacaattaacacaaaattcccacaagttcttgaggataaaagtattatgggagtgactgcaattgtgtcagttgatttaccacacgtgaaaggtaacttaacttttgatttaccacctgagtctgaaaataaatcttttgcagaaacgcttgaaaagtgtgagcagatattttacgacgaaaagtataaagataaagctcagtctgaaaaaatgactgaactaagtacatcaacatcaacaggcacacaaacacttatcaatctgataagtacgctttacgcaaaagaggttttaaaagatgaagatcttattgctattggttagaatttttttacaggaagaagggatagatatgatgattaaattatttgcgattgacttatattatggacgtatggcttggtcaagttttgttaaaaagggattttcagagtttattaataacaaaacaaaagagcaacttgcaattatgtgcgatgaagaattacttgctgaaattttagcaagttagtgaggtagtcggatgacagtagaacaagcagaaagaatcgctcaatcacaatttgtgtgggctattctctttatcttgctttttatgattgtggttggttatctggtgcgaacgtctgataagcgtgagaaaaagctaatggatttccatgaccaatcaaaatcagaatctaacaaacgtgaagagtggctcaaaggtcacttagataaaaatacagaacagttacaggacatttctcagaccattggtgttgtccaaaaggagatgtcttatatgagtgaccgcattggtcgtctagaaaaagaggagaaataagatgaacgaatttataacacaaatcattacagtatcagtaccaatttttggtatcatcgcaggtattctcacgcacaaagtaaaaaaattacttataaaaaaaggtggagaaaaagctgttaaaattgcagaaattgtcgctcgtaatgctgttgaggcagttgaacaaatatctgtggaagttggtattaagggacaagataagctaacagaagctaaaacagctgttattgatggtttatcgcaatataatatcagtttaacagagactcagttagaaacatttatcgaagctgcggttaaacgcatgaatgatgagtggaagaaaggtcaataatatggtaattaatattgagcaagctatcgcatggatggcatctagaaaaggtaaagttacttactcgatggactatcgaaatggtccttcatcttacgattgctctagctctgtctattttgctctacgctcagcaggcgcatcagataatggctgggcagtaaatacagaatatgagcacgattggttgataaaaaacggttatgttcttattgcagaaaatactaattggaatgcgcaaagaggtgatatttttatttggggtaaacgtggggcttcggctggagcttttggacatactggtatgtttgttgatccagacaatattattcactgtaattatggttataactcaattacagtgaataaccatgatgaaatctggggatataatggtcaaccttatgtttacgcttatcgttacgctaggaaacagtcaaatgctaaggttgataatcaatcagttgtatctaaatttgaaaaagagttagacgttaacacaccgctaagtaattcaaatatgccatattacgaagcaacaatttcagaagattattacgttgagtccaagcctgacgtcaatagcactgataaggagttgcttgttgctggtactagagttcgagtttacgaaaaagtaaaaggctgggcaaggataggcgctccacagtctaatcagtgggtagaagatgcttacttaattgatgcaacagatatgtaaaccaacagagcgacataaatgtcggtagcaaaaaattatggaggtaaaactccttaagataagacaaatgccctcgctttgcgggggctgtttttgttatcaatagtgaatgcaacaaaattttttcaacaatatattgtgctaaaaatgtatttttatatataatcatccaatatgttgtggttgcttgaatttataaatttcaagacacgattttgtggcttgacattatttttaaaaaaagtataattatcttaacaagacaaaccccccattcctttataggcagatacgttctgatatggggctttttttatatcgttaggagagttatgaaacaacctttagctttgacatgggaagatcaaattagactacttgaaaaacgtggattaattgttaaagctgatgatgtagagaaaatcaaacatatcagttattatagaattaaagaatttgcaaaaccacttgaaataaagcaacaagatggtgaggagcaggatattttatatgataatattgagtttgcagaagttttggcaagatattatcaggataaaaacttaagaatctatctactgcacgctattgaaaaaattgaagtgtctattaaaacaaaaatttcttttgttttgggggatagatatggggcgttcggatatttaaatttctcttcatgggctaataggaataagtttacaaaatatgatattgaaaaaagacaatttaggattaaaaagaatttattgaatactgtaagaaaatctcaactaactgagttacaaaaatcaattaaccttgatctagatggattcccaacagtgtggcttgctattgatttattgatgtttggtgacatcgtttcaatcttaacaatcatgagtgagaagaacattaaacagatttgtcaatattacagttgtacaccagaagaacttgtttcgtggcttaaatgtttgaatttcataagaaatgtatgtgctcataattcaaatgtactggatattcaaatcacaacaaagcctaaacttcgttcagaatggagaaattatattgatacagtaataattaaacataacgtgactaaaccttctaataagttatccgttattattgctattgtagtctatcttgtaaatactattaattccaaatatcaatggagaaatatacagtctagtttgaaggctctttgtaaagaagatgacagtagggcaaagcttttaggttttaaagattatgattctgttaaagcaatgattaatgggataaagtgtactacttttacaaattcaaaaaaatagaaatttttagcaagaatcgcctgatactagctgttcttgcttttttatttgctaaagaaagatatagatgttataattaataaaaataataaggagacacattatgtcacaagaaaaactaaaatcaaaagttgaacaagcatcaggtagcctaaaagaaggagctggtaagctaactggcgataaagagttagaggcaaaaggttttgtcgaaaaaacaattgctaaaggtaaagaactagcagatgatgctaaagatgctgttgaagaggcagtagatgttgtcaaagaaaaactgaaataaatattaaccgctctctattgagggcggtttttttgtgtgtctagagtttgctttcaattaattgttttaattctaataagtcttcttttgtagcatttttgttaataaaactacgagcagtagatcgttttgatagataggttctatgttctctattgttttctgcccactttttatttgctttttcttgaggtgttaattctttatccatttcaatcatccttgttaataaagtaaaatacaactaaacaaattgcgaaaataatcaaatatttcatatttgtcttagatatgatatactatcagtagtggcaaggggcttgagccccaaactactactagaaccttatttgaatctccgtggccggtttttctttttaggttctttttttattgctgtgattatgcttgctataccaaccaacagagttccgattgaagtaagcaaatcagcaatttctgatattctcatatcttcctcctttctatatataattatagtacatgtactatataaagtcaatacttttttttaaaatatttatctttttgtctatcagaacagaaaaatttaaaattgtctatttttaggattttttatcgaatagatagataggaggataaaatatgttatatatagatgagtttaaagaagcgattgataaaggctatatttcagggaacacagtagcgatagtgcgtaaaaacggaaagatatttgattatgtgttgccgcacgaggaagtgagagatgatgaagttgtgacagttgagagtgtagaagaggtgttgagggaattgaagtgaaagggtgcaaaaaaggggcaaaatagattaaaaatgaaactacattgaactttttactattataaacaaccattaaatcaacgcttggactattatgaactattgtgtacaatagtagtagattccggcaggggacatattcattgcatgtaaatagcggtttagagctattttgccccaaatccgccccaaatttctctgattaagtttatcgttcctatctttttgttcttgtaattgatgtgcgtaaacttctaaagtgatatttaaattctcgtgatctaaaacttgagagatggaaattagatagcttgcaaatgtatgcctgagagagtgcactcgtacctcgcgaccagttatttttcggatagttttattgactgcattatttgaaagtttgtcgaataatctgtcgtttttattttttgtaaattcatgcaaaaaaaataatgtatcattgtcaattggtatatttctgatactacttttgttttttgttggcaggtatctttggttgaaatgataatcccaagttttattaattgataaatatttgttagtgtaatcaatatcattaactgttaaacctaaacattcagcgaagcgcatgccagttttagcgatgaggtataacgctgcatacgattgatgttgtgatttttctttacaaatttttatcaagcgtaagtattcattggtttcaagaaattttatctctatttacgccccttattttttgctttaaccttagtgaataaacaaaaatttttttctatatatccctcgtgaacagccatggatacgcaggcttttacatgtatgttaaaacgctttactgtatcttgcacatgcgtttgactataatgatttatgacttgttgatatttagtggaagtaatattgcaaagtaatatatttcctattatatgtttatacgatattcgatattcccacccgttgtcgcgtttacggaaatacgccattgatatactccacattagctaaagaacagggtgttcaaggctaccttgatggaaaaggctctcttagagatatttgtaaatggtatgatatctcaagtcgctctgttctccaaaagtggataaaacggtatactagtggtgaagacttgaaagccactagtagaggatatagccgtatgaaacaaggaaggcaagccacatttgaagaacgtgtagagattgttaactacaccattgcccatgggaaagactatcaagcagctattgagaagtttggtgtttcctaccaacaaatttattcttgggtgcgtaagcttgagaagaatggctcacaaggtttggttgatagacgtgtgaaagggttggagagtaggcctgatttaaccgagattgagcaactttaactcaagattaaacaattggaggaacgtaatcgtctcttagaaatcgaggttagtttactaaaaaagttagaagacatcaaacgaggaaacagacggtaagactaggtaagcatttagcggagttccaagtaatcaagaattattacgatgaggaatctaatgtgcctattcaggccttatgccaactcttgaaggggtctcgttcaggctattacaagtggctcaatcgtcaaaaaacagattttgagacaaaaaatacaaagctaatggctaaaatcaaggaacttcatagactctacaatggtatcttaggttatcgccgtatgacaacatttattaatcgtcaacttgggacaacttaaaacaagaaacggattcgttgattgatgaacattctggggattagttcagtcattcgtcgtgttagccatgcttgtacaaaagctggtgacagattttacgaagaaaatattcttaatcgtgaatttacagccacagctcataaccagaaatggtgcacagatgtcacctatcttcaatacggtctgggagctaaagcttatctcagtgcgattaaagacctgtataacggttctattatcgcttatgagattagtcacaacaatgaaatccacttgttatgaagaccattaaaaaggggctagagctcaatccaggagccacacctatcatccatagcgattgaggtagtcaatatacttccaaagaataccgttatatcatacaacaagctggtctgaccttatccatgtcccggattggcaaatgtattgataatgcaccaactgaaagtttctttgggtttttcaagactgagtcttaccaccttaagaaatacaactcttatgatgagttggtcaatgatgtggcacgttatatcgaattctacaacacacaacgttatcaatcaaaattaaacaacctgactcctctagaattcaggaatcaggttgcataacttatcttttattatttgactgtctacttgacagggagccgttcagattgcttaacctttctaaatttgctaaaatagctacaagaaaacgagccatttaatgcttatttcttatactgtcttgcctcacgctctcctcgaccaaaaattgagcgtgaggctttttgtttcattaaacgatgatatttccatattcatcagtttgttttccgagagccatcaaagcttcgataaggtcgataattccaggaataaaggtaatactaaaaataatatataaaaaaacctggcctatttttcctgcgtaaaatttatgcgctccaatgccgcccaaaagaacgttaataaaacataaactactatgttagcataagactttatttttacaactgaatttcatataaatggattagagtaagggataaaagaaattagcatagctcttttgaaaataaaaaaattaatataatatggaaaaaattttatttcataaacgtttcataaaaggtatgtaatctagtatttaggcaacactattttgtcactggtgtctagtaacttatagattgataattttactagtaaacgtaattcttcgctttaagagttaaatgtctatttattgtaagctaaattgggaggtgaacttatgtaaaattagataggtactgtcaagtacgggatgattattgaaacagccagtatgcatcataaaatctgtattgcttaataactatttccttaaccagacatcagttcattgtttatcatcgctaccctaagtctagttttttcaatagagcattaggtagtttttgataataaaactatataaacatgagaattagatttcgtatcgcattcttcataatgagttatttgagattttcctttgaataaatagatacgaaattcagtaacttcatatataaacggctctatcattgagatagtttgtcaaatgaagaaattttaatggaaatagttttaaaaacattagttgtaggcgatgtaaaaatattaatccagtggatgcaatagttgcggagtaaaaatagagaggagtaattaggaagtgataaaaaatgctatagcatatattaccagaaaaaaaaatagaacacttattatatttgctattttaacaattgttctttcttgcttgtattcatgtttaacaataatgaaatcaagtaatgaaatagaaaaggctttatatgaaagttctaattcttcaatatcaattacaaaaaaagatggtaaatattttaatattaatcaatttaagaatattgaaaaaataaaagaggttgaagaaaaaatatttcaatatgatggattagcaaaattgaaagatcttaaagtagttagtggtgagcaaagtataaatagagaagatttatctgacgaatttaaaaatgttgtttcactagaagctacaagtaatactaaaagaaatcttttatttagtagtggagtatttagttttaaagaaggaaaaaatatagaagaaaatgataagaattcaattcttgttcatgaagaatttgctaaacaaaacaaactaaaattgggtgatgaaattgatcttgaattactagatacggaaaaaagtggaaaaataaaaagtcataaatttaaaattataggaatcttttctggtaaaaaacaggaaacatatacaggattatcatctgattttagcgaaaatatggtttttgtagattattcaactagccaagaaatattaaataaatcagagaataatagaattgcaaataaaattttaatgtattctggtagtttagaatctacagagcttgccttaaacaaattgaaagactttaaaattgataagtcaaagtattctattaagaaagataataaagcattcgaagagtctttagagtcagtgagtggaataaaacatataattaaaataatgacttattcgattatgttaggtggaatagttgttctttcattaatcttgattctatggttaagagaaagaatttatgaaataggtatatttttatctattggaacaactaagatacaaattataaggcaatttatatttgagttaatattcatatcaataccaagtataatatcctccttatttttagggaatctactattaaaagtaattgtagaaggatttattaactcagagaactcaatgattttcggtggaagtttaataaataaaagcagttttatgttaaacataacaacacttgcagaaagttatttaatattaataagtattattgttttatcagttgtaatggcctcttcattaatattatttaagaaaccaaaagaaatattatcaaaaataagttaggagcaaataatggatatattagaaataaagaatgtaaattacagttacgcaaattctaaagaaaaagttttgtcaggagtaaatcaaaaatttgaacttggaaagttttatgcgatagtagggaagtcaggaacaggaaaatccacacttctttccttacttgcaggacttgataaagttcaaacaggaaaaatcttgtttaagaatgaagatatagaaaagaaaggatatagtaatcacagaaaaaataatatatctttggtatttcaaaattataatttaatagattatttatcgccgattgaaaatattagactagtaaataaatcagtagatgagagtatcttgttcgaattaggtttagataaaaaacaaataaaaagaaatgttatgaaattatctggtggtcagcaacaaagggtagctattgctagggcactggtatcagatgccccaataatactagctgatgagcctaccggtaacctagacagtgttactgctggagaaataattaatatattaaaggaattagctcaagatagaaataaatgtgtaatagttgtaacacatagtaaggaagtagcagattctgcggatatcattttagaactaagtggtaaaaagttgaaaaaagtaaataaaatgaatttggaggttgaataatgataaaaaatgcatttgcttatgtaactagaaaaagcttaaaatcattaattattatattagttattctatcaatggcaactttaagcatcattagtttatctattaaagatgccacagatagagcttctaaggaaacatttgctaatataacaaacagtttttctatggaaataaatagacaagtaaatccaggaacacctaggggtggaggaaatgtaaaaggtgaagatattaaaaagatatctcaaacaaacagtatagactcctatgtaaaaagaataaacagcgtcgcagacctagttgatcatgatataattgaaactcaagatacacttgcaaatcaatcacctgaaagagcaaagaattttaagagaacagttatgttaacaggggttaatgactcagcaaaagaaacaaaatttgtatcagaagcatataagttagtagaaggaaagcatttagaaaataaagataaaaataaaattttaatgcataaagatttggcaaaaaaaaacaatctcaaagttggagataaaataaaaataaaatctaatttgtttgatgctgacaatgaaaaagttgcaaatgaaactgtagaagtagaaattaaaggtttatttgatggtcataatagcggtggggtaagtgcagcacaagaactatacgaaaatacactaatcactgacgttcattcagctgctaaagtttatggtaatacagaagatacagccgtataccaagatgcaacattctttgtaaaaggtgataagaatcttgatagtgtaataaaagatcttgggaaactagatataaattggagagaatataatttgattaaaagttcatcaaattatcctgcgctgcaacaatctatatccggtatctattctatttcaaacaaattatttgttggctcattaatatttgcaggagttgtagtttcattattacttttcttatggatgaatgccagaaagaaagaaatagcagtattactatcattaggtatatctaaattagaaatttttggtcaatttataatcgagatggtatttatatccattcccgcacttcttggatcttatttcttagctcaatatacagctgataagctagggaataatatattgaataaagttactggcgatatagctaaacaaatagctagacaatctgcatctagtcaattaggcgggggggcagaagctgaaggattcaacaagactctttcaggtttagatataaatgtattacctaaattcataatttatgtagttatatttatgagttttgtacttcttgtatcattgattctttcttcaatttatacattaagaaagaatccaaaagagttattaattgataataattaaaattttcggtgatttatatcaccgaatgttttttgacttataaaaatcaaataatatactgtataatattatgtatagatttaaatggaggtatctatgaaaatattaactgttgaagatgataagttgataagagagggaataagtgaatacctttcagaatttggatatactgttattcaggctaaagatggaagggaagccttgtcaaaatttaatagtgatataaacttggttatcttagacattcagataccttttataaatggtttagaagtgttgaaagaaattagaaagaaaagcaatttaccaattctaattttgactgcatttagtgatgaagaatataaaattgatgcatttactaatttagtagatggatatgtagaaaaaccattttcattgcctgttttaaaggctagaatagattctttaattaagaagaattttggacatttagagaagtttgaatataagaatctttcggtaaattttaatagttatacagctaaaataaatgatgaaaaaatagatgtaaatgcaaaagaactcgaaatactaaaatgtttattggataatgatggacaagttttaacaagaatgcaaattattgattatgtctggaaggatagcgaagagatcccttatgatcgagtagtagatgtatatataaaagaacttagaaaaaaattacaattagactgtataactactataagaaatgtaggatataaattggagagaaaatgaagaaattaaaaatattcccaaaaatgttcatacaaatattttctattcttggaatactaattatattagttcattcattattcttttttatctttcctaaaacatatttggagacgaggaaagtaaaaatccacattatggcagatgaaatttctaaaaatatgaatggaaaagagttaaaatatttagaccaaactttggagctttattctaaaagtagtgacataaaggtatttataaaaaaaaataataacaaaaatgaattacaaataaatgataatataaatgttaatgtaaaaagtgatagtaattctttaataattgaagaaagggaaattaaacttcatgatggcaaaaaaatacatcttcaatttgtttcaacagctgatatgcaaaaagacgcgaaagacttgagccttaagtttttaccatattctttatcgatatcatttcttttttccattgttatttctttaatttatgctaaatctataaaaaacaatatacaagaaataactatggttactgataaaatgataaaacttgacaaagaaacaagattgaaaattagttctaatgatgaaattggacaactaaaacagcaaatcaatgacttatattgtgctttattgaatacaattaatgatttggaatttaaaaataaggaaattttaaagttagaaaaattgaaatatgatttttttaagggggcgtcccacgaacttaaaactcctctttccagcctaaagatattacttgagaatatgaaatataatatcggaaaatataaagatagagacttttatatcagtgagtgtattaatattgtagataacttaacaaagaatgtctcgcaaatattatctttttattctataaaagacttgaataatgatgaagaatatttaaatgttggtgatacattagatgaagtattagaaaaatactctatcttagtaaatcaaaaaaaaataaatattaataaggaattattagactataatatttatataggaaaaacggcactaaatattgtattttctaatttgattagcaatgcagtaaaatatactaatcgaaatggaataattaatatcaaaatagctaatgattggttacttatagaaaactcatatgataaaaataaaatttcgaaaataaataaaattttagatgctagttttgatctaaaattggataatagtaatggattaggattaaatatagtaaagaatatacttaataagtataatataaagtatgaaatattacatggtgaaaattattttatatttaaaataaaaataatctcttgagtaataatcatactattggactaatgtcaaataagtagacagaaaaccgtgttattttattgcgttaaaataattttcttctttctgattaggggttagtcctagattagccgtatgtgggatgtaattgttataaaaattctcaatgtattcaaagcagtctaattgaacctgtttgatattttgataatttttttggttgatttgtctatgctttaaatacttgaaaaatgcttcagttacggcattatcataaggatatctaggtttagaaaaagaatgcatgatattgttgtcatcaattatttttctaaattccctggccttaaattgtgacccttggtcggaatgaaagagaagtgttccttcaatctttcttttattaagagctaattctagagtgtcacatgctaactttgcatccatacgatgactcaatttccaagcaatatattttctagaatagagatcaattattgcgcagagatagacatatttcttatatccaatagaaatataggtgaagtcagtagaccatacttgattaggtttatcaggattaaatttctggttgagtaagttttgaggatacgttttttgagtctttttaagagctgtttttgtcttaacggtagccattttagggagcgccatattcttcatcagacggtaaattcttccttcagagatttttgtgtcttttaaaacaggttataacacacaaagtgttgtctatttttatagtatacatccatactcgcataaccatgagataatcactaaaacaagagtcgcctgacactagcgactcttgtttttatttgctaaagaaagatatagatgttatgattaataaaaataataaggaggtgcagtatgtcacaagaaaaactaaaatcaaaattagatcaagcaaaaggtggtgctaaagaaggctttggcaaaataaccggtgataaagagttagaagcaaaaggatttatcgaaaaaacaattgctaaaggcaaagaactagcagatgatgctaaagatgctgttgaaggggcagtagatgctgtcaaagaaaaactgaagtaacaaataaccgctcatttaacgagcggttatttgttatctttttgtctatcagaacagatatagatgagtttaaagaagcgattgataaaggctatatttcagggaacacagtagcgatagtgcgtaaaaacggaaagatatttgattatgtgttactacacgaagaagtgagagaagaagaggttgttacagttgagagagtgcttgatgtactgaggaagttatcataataacggaccaaaattcgccccaaaaagtattttaaaatagaataaaataaaaaaatatgctttttattatggatgtatcgtgtattttaacctttaatatatcctattttaatggtagagaagttggcaggggacatattaaaaccttttttgagatgttaggaaggattttattctttagactagtgttgagaaaataacaaaacttaaataatcttatttaagttttgtttaaggtgaactttgtatactttaaatatcctaaataaacttttcttttcatgttctttgttttactgatgaagaacaatctcctaatatttgcaactcataatgatttgagttgcattttttattgcaaaaaatataagtcagattctgaaaaaatgttataataattaccatgaataaaaaaggaagtcctatgtcacaaaaatcaaactattttaaagggcaaattgattatgctgttgtgataccagtattttttttattaatgattggtttagcctcaatttatgttgcaacgatgaatgattatccttctaatatctatatcgcgatgtttcagcaggtgtcttggattattatggggtgtattattgcatttgtcgttatgcttttcagtactgaatttttatggaaagccacgccctatctgtatgctttaggactaaccctaatggttcttcccttaattttttatagtccacagctttttgcggcaacaggtgctaaaaattgggtgaccattggctcggtaactttgtttcaaccgtcagagtttatgaagatttcctatattttaatgttatctcgaataactgttagttttcatcagaaaaatcgcaaaacttttcaagatgattggaagttgctaggattgtttggtttggttacattgccagtgatgattcttctaatgttacaaaaagatttaggaacagcattagttttccttgccattttgtcaggtttaatccttttatcgggcatatcttggtggataatcttgccaattttatctactatcgttctttttatagctagctttttgatgatttttatctcaccaaacggcaaggaatggttttataatttggggatggatacatatcaaatcaaccgtttatctgcttggattgatccatttagttttgcagactcaattgcttatcaacaaacacagggtatggtatcaattggaagtggcggggtaacaggtaaaggttttaatattttagagctctcggttcctgttcgtgaaagtgacatgatttttactgtcattgctgagaattttggcttcattggttcggcgattgttttagggttatatctcattatcatttaccgtatgttaaggatcaccattgaatctaataatcaattttatacttttatatcaactggttttatcatgatgattgttttccatgtttttgaaaatattggtgcagcagttggtatattacctctaacaggaatcccacttccgtttatttcgcaaggtggaagttcattactaagtaatcttattggaattggattggtcttatccatgtcttatcaaaatacagttcgtcaggccaaggctaatggatcacatttgaagtatcgtagtatataacaaaaaaaggttggaaagataatccagccttttaataatcgaaatattttagaggagtgagttaattaagtaaggtggtagctataaaaaatcgtaataatatgatataataaagggtatgaattatcatgattatatttgggatttgggtggtacactacttgataattacgaaagttccacacgtgcttttgtagagactttgaaagaatttggatatcaagcagaccacgatagtgtgtatcaaaaattaaaagagtcaacagcagatgcaattgcatattttatccctgaagaagctgattttttaaaagagtataaggctaatgaagctaaggttttggaaacaccaattctattccaaggggcaaaagaacttttagcgaaaattcaaagacaaggtagtcgtaattttttggtgtctcatcgtgataatcaagttatagttattctggaaaaaacagaaattattgactattttacagaagtagtgactgctgataacggcttttcaaggaaacctagtcccgagagtatgctttatttgaaagaaaaataccaaattgataattgtttagtaataggcgatcgtgatatagataagcaagcaggagaatcggctggttttgataccttattagtcgatgggtcaaaatcattgatggagataatagagtaaatgacagaagaaacaaagaatatggaacaacgtgctcaagaatatgacgcaagtcagattcaagtattagaaggtttagaagctgttcgcatgcgtccaggcatgtatatcggttcgacttcgaaagaagggcttcatcaccttgtatgggaaattgttgataactcaattgatgaagccttagctggatttgcaggacatattaaagtttacattgaaccagataactctattacagttgttgatgatggtcgcggtattccggtagatatccaagaaaaaactggaagaccagctgtagagacagtttttacagttctccatgccggtggtaaatttggtggtggcggatacaaggtttctggtggcttacatggtgtagggtcatctgttgttaatgcattgtcaacacaattagatgtcaaggtttataaaaatggcaaggttcattatcaagaataccaacgcggtgttgttgttaatgatcttgaaattatcggtgatactgacttatcaggaacaacagttcactttacgcctgacccagaaattttcactgaaaccactgtatttgattttgataaattagccaaacgtattcaggaattagcttttttaaatcgtggactaagaatctccatttcagacaagcgagaaggtcaagaagttgaaaaagaatatcactatgaaggtggtataggttcatacgttgagtttatcaatgagaacaaagaagtgatttttgaaaatcctatttatactgacggtgaattagatggtatttcagttgaagtagcaatgcagtatactactggatatcaagagactgttatgagttttgcaaataacatccacactcatgaaggaggaacgcacgaacaaggatttcgtactgccttgacacgtgtgattaatgattacgctaaaaagaataagattctcaaagaaaatgaagataatttaactggagaagatgttcgtgaaggtttaacagcagttatatctgttaaacatccaaatccacaatttgaaggacaaactaaaacaaaacttggaaattctgaagttgttaaaattacaaatcgtctctttagcgaagctttcaatcgattcctattagaaaatccacaagtagctaagaagattgttgaaaaaggaattttggcatctaaagcccgtattgcagcaaaacgggcgcgtgaagtaacacgtaaaaagtcaggcttagagatttcaaacttacctgggaaactggctgattgctcatctaataatgctgagatgaatgaactttttatagtggagggagattctgcgggagggtctgcaaaatcaggacgtaatcgtgagtttcaagcaattttaccgattaggggtaagattctaaacgttgaaaaagctacaatggataaaattttagcaaacgaagaaatccgaagtctcttcacagctatgggaactggatttggtgcagattttgatgtatcaaaagtcagatatcaaaaattagtcattatgactgatgccgatgttgatggagctcacatcagaactttacttttaactctgatttatcgttttatgcgacctgttttggaagcaggatatgtttatatcgctcaaccaccaatctatggtgtcaaagtaggaagtgagattaaagcttatattcagccaggggtcaatcaagaagaggaattacgtcaagctctagatacctatagttcaggacgttcaaaacctactgtacaacgttacaaaggtctaggtgagatggatgaccatcaactttgggaaacaacaatggatcctgaaaaccgcttgatggcacgtgtctcagttgatgatgcagcagaagcagataagattttcgatatgctaatgggagatcgagtagaaccacgacgtgaattcattgaagctaatgctgtttatagtaacttagatatctagtccaaagatagctttgaaaaacagttcaagtatgctataatcttaacgttatagtagatttttagaaaattagaccattataaggagagttgaatgtcgagcggaatcatattgctgcttgtggctatagtcctgcttgtgattattgcctacgtagtcggcgtcgtaataagaaaacgtaatgatacattaattgcaaacttagaaactagaaaacaagagttagttgaccttcctgtgcaagaggagattgagcaagtcaaattgcttcatttgattggccaaagtcaatcaacttttagagaatggaaccaaaaatggactgatttatcaactaattcatttaaagatattgattttcatttagttgaagctgaaaatcttaatgattcatttaattttgtgcgtgctaagcacgagattgataatgttgatagtcagctaactattatagaagaagatattgtttcgattcgtgaagctttagaagttttaaaagagcaagaagagaaaaatagtgcccgtgtaacacatgctttggacctatacgaaacacttcaaaaatcaatttctgaaaaagaagataattacgggacaaccatgccagaaattgaaaagcagttgaaaaatatcgaggctgaattttcacattttgtgaccttaaactcaactggtgacccgattgaagcttctgaagttttgaataaagcagaggagcatacgattgctttagggcaaattacagaacaaattccagctattgttgctaaattagaagacgattttccagatcagttagatgatttggagacaggatatcgtcgtcttttagaggaaaactaccatttccctgaaaaggatattgaacaacgttttcaagaagttcgtgaggctattcgttcgaattcagatggtttagttagtttggatctagatcgtgctcgcgatgaaaatgaacatattcaagaaaaaattgataaactttatgatatttttgaacgtgagattgctgcttataaagtagctcataaggatagtaaaattattcctcaattccttgctcatgcaaaatctaacaatgaacaactggggcatgaaatcaaacgattatctgctaaatatatcttaaatgaaaatgaaagcttaagtttacgttccttcacaaatgatttggaagaaattgaaacaaaggttttaccttctgtagaaaattttggtcaagaagcttcaccttatactcatctacaaattttatttgagcgtacgttgaaaacattgactactgttgaagaaaatcaaatggaagtttttgaagccgttaaaactattgaaagcgttgagacacgagcacgccaaaatatggataagtatgttaacaagctccatatgattaaacgtttcatggaaaaacgcaatcttccaggaatcccgcaagacttcttaagcactttctttacaacaagttctcaaattgaggcacttattaatgaactcagtcgcggtcgtattgatattgaggctgtttcacgtttaaatgatgtgactacaaatgctatcgctaatttagagcaagctacatatctagttgttcaagatgcgactctcacagagcagttactacagtattcaaaccgttatcgtagttttgaacaaaatgtgcaaaagagctttgaacaagctttgtacttatttgaagttgaacataactataaagcatctttcgatgaaatttcatacgcacttgagactgtggaaccaggtgtaactgaccgttttgtgacgtcttatgaaaagacacaagaacgtattcgtttctaaaaaagaagagttagtactcttctttttttaattgctatctatgaaaggtgctaattttaaggtacaatagtaaaaaagttttggaggttttaaatgattaaaggtttgttagtcatggacgttgattcaaccttaataatggaagaagctattgatttattagctattgaagcaggggtggggaaacaggttgctgcactgactgacgctgcaatgcgtggcgagttagattttgaagaagctttgaagaaaagagtagcgctacttaaaggtttgcctgttactattttgacagatatattatcctcaatacattttactccaggggcttatgaattgattaaagagtgtcacaagcgtcagatgaaagttggtcttgtatcaggaggttttcacgagacgattgatatcttagctaagcaattacaagttgattatgtcaaagcgaatcgtcttggtgtcaaaggtggttttctcactggcgaagttgagggagagattgtcactaaagaagtgaaaaaaataaagttaaaagagtgggcttctgaaaatcacttagacctttcacaaaccatcgcaatgggagatggtgccaatgatttaccaatgatcaaatccgctggggtaggaattgctttttgtgcaaaaccaattgtcagagaagaagctgcgtatcagattaatgaaaaaaatttgcttaaggtatttgatattattgatgcaaatgaaaactaggcctttattaagcctagtttttagattaaggattttaagagttttatttgagagggtattaatttgtttttagataaaaataaatcaatatattctggttttaaccagatatagtcaacggtctctccttcttgcaatgtaattatatcttttgcaccattgtattttgcgataaaatggtctacaaagtaagaacgctcagagaaccactctctattaagaaaggttagacattgaggaacgataccagtttcttctttgagttcccttagaatagcttgcttagcattttctcctttaagggcagatccgccagcggtggcttcgaaataagcaggaaaagctttctttttagggtgccgtttcatcatcaatacgtcaccatcctcatgaaaaaggataacatcaacaactaagtggaataagccttgtgggatattttgatccctattaagtgtaagacctgtaatgaacccatattggtcataagcatcccaaatttccattagacctccttgttatttttgactaaagaaatgttgccatagactttttttaggagactcctctttttttggtgaattgaataaatcagggaattgtgtctcaaaatcgttccattcaacgttttcagccttatcactatgtataataataccaaatggagaattggcatttgcttcattaacaatcgtagcagctagtgatagacggttagctaacttcatgtagaacatttgaacatcagtagggagatttggtgataattttaaactaagattaggatattcaagtatcagattattaagagcagatgttatagcaagttgaaacttttcttcttgtgcctcttttaaacttaagtggagcacaactctttctttataagtaccaaggtagtaacgttgttgatcaggatcaagacgattttcaccgcttgctttttgtaggattttattgtcaagttcagtcataatttctccttgaatttgctaattttattataacctaaatgggttgcattagcacaggtaaacttgaaaagaattagtgatttttttatcaaaaaccacgtaataaagcggtttcactgggtttttccttgttattaactaaagattatgatattatgaatatgtaaaatattaaaactcataaggagagtattgtaatgtcaattattactgatgtttacgcacgcgaagtccttgactcacgcggtaacccaacacttgaagtagaagtttatacagaatcaggtgctttcggacgtggtatggttccttcaggagcttctactggtgaacacgaagcagttgaacttcgcgacggcgacaagtctcgttacggtggtcttggaacacaaaaagctgttgacaatgtaaataacgttattgcagaagcaatcattggttatgatgtacgcgaccaacaagctatcgaccgtgctatgatcgctcttgacggaactcctaataaaggtaaattaggtgcaaatgctattcttggtgtttctattgccgtagcacgtgctgcagctgattaccttgaagtaccactttacagctaccttggtggattcaacactaaagttcttccaactccaatgatgaacatcatcaacggtggttctcactcagacgctccaatcgcattccaagaattcatgattatgccagttggtgcaccaactttcaaagaagcacttcgttggggtgctgaagtattccatgctcttaagaaaatccttaaagaacgtggtcttgaaacagctgttggtgatgaaggtggatttgcacctaaatttgaaggtactgaagatggcgtagaaactattcttaaagctattgaagcagctggttacgaagctggcgaaaacggaatcatgattggttttgactgtgcttcatcagagttctacgatgcagaacgtaaagtatacgactacagtaaattcgaaggtgaaggtggagcagttcgtactgctgcagaacaaatcgattaccttgaagagttggttaacaaatacccaatcatcactattgaagatggtatggatgaaaacgactgggatggttggaaagctcttacagaacgccttggtggacgtgtacaattagttggtgacgatttcttcgttacaaatactgattacttagcacgtggtatcaaagaagaagctgctaactcaatccttatcaaagttaaccaaatcggtactttgacagaaactttcgaagctattgaaatggctaaagaagctggttacactgcagttgtatcacaccgttcaggtgaaactgaagattcaacaatcgctgatatcgcagttgcaactaacgctggtcaaattaaaacaggttcattatcacgtactgaccgtattgctaaatacaaccaattacttcgtatcgaagaccaacttggtgaagttgctcaatacaaaggtatcaaatcattctacaacttaaaaaaatagtctcagattattaaacagttgaaaatataataaaaaccatcttgcatatgcaagatggtttttatgtacacattataataatagaattgatttgataataaacagttctaccattgcaatccagcagcagcgatttctgcttttgaagcgtattgtccatttggacgatgccaccttcctctatagtcacgtttgtagccttgactagtttgttcttgtactagagtttcttgttttttctgagtttcagctgcgagccttgcttgctcctctttttgcttcctttgagcttcagcagcaagccttgcttgttcttcttccagttttttctgagtttcagcagcagctttttcctcttcaactttcttttctgcaagtcgtttttcttcttcgtgcttagcgataagttttctttgttctttagctgataagacagtattttgagcctttccgctgaggtagtcaatggtagcatttggtgaggtattctctaaggtaacagtgctgatgccgaattgatcttgagtggatttgtttccgataaaaataggtaataatttcccagtcttatcaataccaacatattttaattcaatttttcttggaattagttcattattttgataaattggtgttactttataatctaagtagtagtttttatgagtcgaaagccaagtctttagttgtttttcatagaatagcatgctctcagggttagatgaattcgtgctattgtagtttccagtatttagccaattcgtcattggaactaaattctttctttcattgtttagtccactaaattggtggcaaataagacggcctcggctcattagccaagctttttgagtaccatcattataatagaatttaaaattgtgccatccaacaggggttgtttttaaacgttttactctctttttcttgggttcatctttaacttttagctgaatatgtgcgaatgtggcacgacctttgtcatccaactctcctaaaaccaattgtcgtttgtgtttaaaaggtaaagtaccattctcttttgttttatactcttgagcagtaacaatattttctgtggtatgatttgtagctaggtttattggtgtgtaaagcgaaataaccgttagtaaggttgcaattcctaattttataaactgttttcttttcatctgttaacctctaaaataacataaaatagtagctgtttatttttaaatgcattctgaaaattaaaatgtgatttttgtaacaatattataacataatgatgtatgacatgtgaagttaatttataaaagatgttacagctatatagaggagctatagtataaataaaaaattcaaaatatagcatatattatgatacaataatagcaaaatagattttgggagttatcatgaaattactgactaatgcaaatactctcaagggaaccatccgtgttcctggcgataaatcaataagtcacagggctattatttttgggagtatatctcagggagttacccgaattgttgatgtcttaagaggcgaggatgttttatcaactatagaggcttttaaacaaatgggggttctaattgaagacgatggcgagataatcactatctatggcaaaggatttgcaggtttaacacaaccgaataatctcttagacatgggaaactctggtacttcaatgcgtctgatagcaggtgtgttagctggtcaagagtttgaagtgacgatggttggagacaatagtttgtcaaagagacctatggatcgtatagcattgcctttaagcaaaatgggagctagaatttcgggagtaactaaccgtgatttaccaccattaaaacttcaaggtacaaaaaaattaaaacctattttttaccatttacccgtagcttctgcacaagtaaaatcagctttaatttttgcggctttacaaactaagggagaatctctcattgtagaaaaagagcaaacaaggaatcatactgaggacatgattcggcaatttggtggacatttggatattaaagataaagaaattcgactcaatggcggtcagagcttagtaggacaagatataagagttcctggtgatatttcgagtgctgccttttggatagtagcgggtcttattattcctaacagtcatattattttagaaaacgtaggtataaacgagacacgaactggaatccttgatgtcgtcagtaaaatgggtggaaaaattaagttatcttcggttgataatcaagtaaaatcagcaacccttacagttgattactctcatctacaagctactcatatttctggggctatgattccacgtctgattgatgaattacctattattgctcttttagcaacacaagctcaaggcaccacagtcatagcagatgctcaggaattaaaggtgaaagagacagatcggattcaggtcgttgtcgaatcgctaaaacagatgggtgctgatattactgctacagcagatggtatgattatacgtggtaatacccctcttcacgctgcttcacttgattgtcatggagatcatagaataggaatgatgatagctattgctgctctcttggtcaaagaaggcgaagtagatttatctggtgaagaagctattaatacaagctatcctaactttttagaacatttggagggattagttaatgcctaaggtattattgggattcatgggagttggcaagactagtgttgccaactgcttagaaaatgaagtaattgatatggatagtctgattgaaaaacatattggtatgtcaatttcccgattttttacagaagaaggagaagcctcctttcgtgctttagaatctcaatttttaaacgaacttttaaagaaaaaaaatgaaggacttgtgatagctagtggaggaggtattgtactccttgaagaaaatcgtcgtcttttaactttaaatcgtcataataatattcttttaacaggaagttttgaagtcttatatcatcgtataaaaaaagatgagaagaatagaagaccattatttttaaaccattcaaaagaagaattttatgatatttatcaaaaacgcatgttactctatagtggtttgtctgatatgattattgataccgattatcttacaccacaaaaaatagctactgtaattggagagtcactggttaatttatctaactaagttatcacagtttggtagtatgaactattattattgaaagtaaatcacctgaaaatatgtcaagaaataattacggtcagctaaatcatcatgaagagctacgatataactatcttttaaaaaacatccattatcttaatgaacgtgaaaagatggaatttcagtaccttcattataaaaaaacagcagtacgaccacagagaaggacagaaagtccaccaactaattcttattatgaggaaccttattctgattcttattatcaagatgacgatttttactcagagcctcagctaacctcacaaggtttaccaatttatcaagaagagagagctccgaagaagaaaaaacaaagggccagaaaagaaaaacagagggtgaaggttatggcgcctttccctccaaaggctataaccccccctagaaagaaaaaaaaatttaagggtttcctaaagttcataggtattatattactaattgttttatcaggtatggttttcatgtttgttaaaggaatgcgtgatgtgaataatgggaagtcacattatagccctgcaattattgaagattttaagggaaaagatgctgttgatgggactaatatcttaattttaggtagtgataaacgtgtcagcgagagatctactgatgcgagaacagataccataatggttgctaatgttggtaacaaggataataaggttaagatggtgagttttatgcgagatctcttagtcaatattcctaattatagtacggaaggttactatgatatgaaattaaatgcgtcttttaatttgggagaacaagataatcataaaggagcagagtatgttcgacaaacgttgaaaaatcattttgatattgatataaaatattatgttatggttgactttgagacatttgcagatgctattgatacactgtttcctaatggtgtcaagattaatgctaaatttggacttgtcggtggacaatctgctgattcagttaaagttcctgatgatttaaggatgaaaaatggcgttgtacctagccaaaaaattaaggttgggattcagtacatggatggaaggacccttctaaattatgctcgtttcagaaaagacgatgatggggactttggtcgaacacaacgtcaacaacaagttatgagagctattgtctctcaaataaaagacccacgtcgtctctttacaggttctgctgctatcggtaaagcctatgctttaacttcaagtaatttatcttatagctttgtcctaacagatggcattccaattttatcagatgctaaaaatggtattaagcaaatgacaattccaagagaaggagattgggtagatgattatgaccagtatggtggtcaagggttaacaattgattttgctaagtacaaaaagatcctaaagaaaatgggactgcgttaacatttttaattatgatataatagagtgatttattgtcactctatttttatctttagtgtataaactaaagacttcaaatgatagatataaaaggaaaattatgttacataaaaatgatattattgaaactgaaattagcgacattagccatgagggaatgggtattgccaaagtagatggctttgttttctttgttgaaaatgctcttccaggtgagattattaagatgcgcgtcttgaaattacgtaagcgtataggatatggaaaagttgaggaatatttaacgacttctcctcaccgaaatgaaggattagactatacctatttacgtacagggattgctgatttgggacatcttacttatgaacaacagctgttatttaaacaaaaacaagtagctgataacctttataaaattgctcatatatctgatgttttagtagaacctactcttggtatgacaatccctttggcatatcgaaataaagctcaggtaccagttcgtcgtgttgatggacagctagagacaggttttttcagaaaaaattcacatactctggtatccattgaagattatttaattcaggaaaaagagattgatgctctgattaattttacacgagatttattaagaaaatttgatgttaaaccatatgacgaagagcagcaatctggtttaattagaaatctcgttgttcgtcgaggacattatacagggcaattaatgttggttttggtgacaacacgtcctaaaatattccgcattgaccaaatgattgaaaagttggtgtctgcctttccttctgttgtttcaattatgcaaaatattaatgatcgtaatagcaacgttatttttgggaaagaatttcgtactctatatggttctgatactattgaggaccaaatgttaggaaatacttacgctatatcagcccaatctttttaccaagttaatactgaaatggctgaaaaactgtaccaaaaagcaatcgatttttcagatttaaactcagaggatatcgttattgatgcctattcaggtataggaacaattggcttatctgttgctaaacaagtaaaacatgtttatggtgttgaagttgttgaaaaagcagtaagtgatgccaaagaaaatgctactcgaaatgggataactaacagtacctatgttgctgattcggctgaaaatgcaatggcaaagtggcttaaagaaggtataaaaccaactgttataatggttgatccaccacgaaaaggattaacggagagttttgtatattctgctgcccaaacaaaagcagataaaatcacttatatttcttgtaattcagcgacaatggcgcgtgatatcaaactatttgaagaattagggtatcatttagtaaaaattcaaccagtagacttattcccaatgacacatcatgtggagtgtgtggctctgctcgtaaaagcctagaaactttttaacgaaaggaatattaaaaagccttagataatcgactgacctattaccaaaaaatcgaaggggctctacttgccattgcacaaacaccaggaaatagtttgccaactatgcagctgttagatgagttagttcttccaaaagacattaccatagcagatgtcagtcaaagtatccaagaatttgaaatagaaagagatgcccttcaagaattttttgacgatatgctgaagacttatacaacctaccaagaaatgaaagattatattaaatctcgtgaagcgaacactcctaagcaagagacagaagaaaaatcactttgaagactgtagacttaacataagtaaaaaataaccatatatgatatcgctttcattcttatgttttttgtgataaactaattaaagaaataatttttatactttattatggaggttcttatgaagaaagtgttagtgagtagtcttttggttttagggattacgataacgttacaaacagtagttgaggctaaggggccaaaagtagcttatacacaagagggaatgactgctctttcggacacaaataaagataaagtcactactatttctattgacgagattcaaaaaagcttagaaggtaagaagccgattactgttagttttgatattgatgatacactgcttttcagtagtcaatattttcaatatggtaaagaatatgtaactcctggatcgtttgattttcttcataaacaaaaattctgggatcttgttgcaaaacgaggagatcaagattccattcccaaagaatatgctaaaaaattaattgctatgcatcaaaaacgaggagataaaattgtttttataacaggtaggacaagagggtcaatgtataaggagggcgaggttgataaaacagctaaagccttagctaaagattttaaattagacaaaccaattgctgtaaattatacaggcgataaacctaaaaagccatacaaatatgataaatcatattatattaagaaatatggttcagacattcattatggagatagtgatgacgatattcatgcagctagggaggccggtgctagaccaattagaattttaagagcacctaattctacaaatctacctttaccagaagctggaggctacggtgaagaggttctcgaaaattcagcttactagtatctttattagttaacatagtattatctatcaatttttagatttgtaataagaagtgctaaaaaagtagcaaatcaatgatatgctaataagggaagttggagtagtttagattgattattaatgactgatcttctcccctctcggtaacaagaagtttttctaacaaatgcctgtctaaaaaaattgaatcataattttttaataactcttttggcgtgaacaaggaatttgtaatcagtcatctaattctataatacaatactttggggttgtttccgtatcattattaataatatgtatcagaaaggagatgttttttgagagtttatgaaaataaagaagagttgaaaaaagaaataagtaaaacatttgagaaatacattatggaatttaataatattccagagaatctaaaagataaaagaattgatgaagttgatagaactccagcagccaacctttcttatcaggttggctggaccaacttggttcttaaatgggaagaagatgaaagaaagggacttcaagtaaaaacaccatcggataaatttaaatggaatcaacttggtgaattatatcagtggttcacagatacctacgctcatttatctctgcaagagttgaaagcaaaattaaatgaaaatattaattctatctatgcaatgattgatttgttgagtgaggaagaattatttgaagcgcatatgagaaagtgggctgatgaagcgactaaaacagcgacttgggaagtgtataagtttattcatgtaaatacggttgcaccttttggaactttcagaactaaaatcagaaaatggaagaagatagtattataaattatatttttaactttaaaaaatttcataaaaatggttaccaaaggcgatagaagaaaaaactatcgtctttttctttataaagtattagatgaggaaaagaaatattattttttctaatacaaatattaaattctcacgacagatgtaatatatcttgctatttcttcaggctcttcagtaaagtcatgatctatccaatttaaaataatactttcaattgttgagatataaataccaagagcgaaagaatatggaacttgatatgctgtttccagttgtttttgtaagtctggtatatcggaatgtgtaatcatctctttgatatagtttttaattatgttgtcaatattcggaaaaaacaaaggatttaataatttctttatttatatacatatagctaagcatctcctttaagaccacttcttcatataataaatcattatttaaaatttttgtgatatcatcaaagattattaaaatagactccctaaggaagtcttcttttgaattgtaatgattatagaaagatcttctactaagtcgagctttttttgctaaatcgctaactttaatttgctcaaagctcctcatctttaacaattctgagaaagcttttaaaaattttaaattagtgttatctgaacttaccaatatactatcacctttatataaaatcttaaagttataaatcttatcgaatgtgattatacaatacaaattcaaataatagttcacatttatcgagataatgtaaaacagtaaaactttaaaaaaagtaaaaatagataactttattggttaatctatttttacttttgaaaaggagagaagttatgcttaggaagtataagcaaagaaattataatgtcgcacatacgaaacagcgtttttcgattaagaaattcaaatttggtgtagcatcggtattaattggattgacatttctaggaatgagtagtcattctgttttggcggatgagtcaagcattatgagtactgaggtaccacaaacagctggtgtaaaaccggaagttactgttacacagcctacttcagatgtaacaagtcttgcgacagatacgtcaacttcagcagtgttatcaacagatgcatctcattctaatcctacagaatcagcggagcatgctgtaggattagaatgagatgcagcggttccagtgacacacgaaaaagaagcaaataaaacattgcgagttacttcttcttccacatctgaattcacagagtggactaatgtcaaataagtagacagaaaaccgtgttattttattgcgttaaaataattttcttctttctgattaggggttagtcctagattagccgtatgtgggatgtaattgttataaaaattctcaatgtattcaaagcagtctaattgaacctgtttgatattttgataatgttttcggttgatttgtctatgctttaaatacttgaaaaatgcttcagttacggcattatcataaggatatccaggtttagaaaaagaatgcatgatattgttgtcatcaattatttttctaaattccctggccttaaattgtgacccttggtcggaatgaaagagaagtgttccttcaatctttcttttattaagagctaattctagagtgttacatgctaactttgcatccatacggtgactcaatttccaagcaatacattttctagaatagagatcaagtattgcgcagagatagacatatttcttatatccaatagaaatataggtgaagtcagtagaccatacttgattaggtttgtcaggataaaatttctggttgagtaagttttgaggatacgttttttgagtctttttaagagctgtttttgtcttaacggtagccattttagggagcgccatattcttcatcagatggtaaattcttccttcagagatttttgtgtcgtagtctctttgaagaatgactttgatagacttcacaccaagtcttttgtttgctttggtataaatctcaagtatttgttttttataaatttgattatccaattctctttttgagggcttatgttttagaaatttatagtaagtggagcgattgacacgtaaaacacgacacaaggttgttgtggcgtgttcaaagcgtaaccgatagacagcgaggagtcttactttaagttttgcatgaatatggcacttgctttttttaggataaggttctcctcttcaagctgcgcattacgtttttgtaactcttgtatttgcttggcagtaagtacagaattatcttcgagtttgaattgagagtactgtttgatccattttgcaagcgcagaagtggataccctatagtctttacagagttcagactgagtttttccagtttgataaaggttaacaagagattgtttgaattcttcatcatagcgtttaaatgttgacataggttgtcctttcgtttttgtgtcttttaaaacagattgtaacacacaaagttttgtctacttttatagtatacatccaccctttggcaataccaaaagtttgagcagattagttgagatgtgcaggaagttttgattatcgcaagagagaatcatcaagtgactcatgaacacgtgtcaatcttattgacctgcgttcaagaattgattgtggaagtcaatcaaacacagccactcagtcgtgagtttcgtgaaaagtatatgggttaggaggctgcaattgtttatcgttatcgtaccaatctcaaaaaagtctttctaacagattcagaattgaatcaattaaatgagcggattgctaagagcaattgtcaaaatttctcagtctatgctagaagagttcttcttaatcccaatatgtcatttgtcacgattaacacggattggaaataacatcaatcaaattgcgcgtgctatcaaccaaagccatctaatttctcaggctcagtatcactttcatcgagaagcacgttaagcccaacagcaggggggttgctctgattcggttaagtaataagcaaaatcctcaccaattttcccagtaataagaggcgttgttgaggtatagggattacctgtgccatagtcgatgatggtcacaaaatgaccattccccataaaagggccaaccaaaacttcacctgtgaccgttttttgatgtcaacaccagtattttggatgtaccccttaacatgccctttggtatctgcaacagagataatatgaccaaaggaagaatcaccgatgactttaaccgtaatcttgctatcgcctttttgattagccgctaatatttgattagcaatcagggtgcgaccaagagcaactgttgaagacgacaaggtatgatgtttttcctgagccaatttaacagtctcggtgctatcgaggacataagacctgaaggcaccagaggcagaaattgatttaataattttatccataacctatgttatagcacaaagagagagtttgtatggactggattagctgaaaattttagactaaaaagtagtgccagtggattttgaaaggtaacaaaagagtcttccgtttaaacgagaaggctctttttagtcgtttcagatgaaggcaaaaggacgatgaaataattccgtaccttcatggattgctatgttactggcatgaggtctcacgatatttagtaagatattcgtttgaagatattcccacgtattttttaaaggttttaagaaaatgtgtggtgtcgtaaaaatgtaataatttcgctacttccccaatcggtacccctctttgcagtagtaattgtccctccttaatttttgcctttagaatataactttgcaaggaaatgtcagagtattttttaaaaactgagcgtaagtgggaatctgagatatataggtagttggcaatatcagatactttgagtttggagtagaggtggttgtccacataatggagaatactattgtacatttgctgcttgtcagagatgctcttattggttaaggattctgaaaaatcaataagagctgcacagcgaattcttgaaacatcaataagatcaggagcctcttcgtttaaagccatatagtgctttaccagcgcataacttttagccacatcagtattttcctcgaaacttaattctagtaattttgttaagtaaacaacagttaagttcttttcagctcttagggcagggattgaagatgaggtaacactggatgatgggaggcgattaatttcttgctttaacagttgagtgttacccagcttaacgagatcaataatgtgattgagatggtttaaaacagtgggtaactgaaaagagtttttcttagtatgttttaggtgaagaacaatatcaggatccgcaacaatctgttctgactcttctaataaatgattgatgacttgttggcaactagcctcaaactgtgtttggaaaaaggcatcgatagacacaagaagactacgtatactggtagtaggaaaacaagggacaagctttatataggataagatttcttttttattacgatgagaaaattgttctagaaagcgactggataactgttcttgcctattgatatcagggctatagggataaaatggtccaatagcaataagatattgacagacaggaaaaattaagaatgattcttcaaaaagaccctcataaacagtgatatcttggttataagggatagctaaatgttttaaaaactgatagtaaggcaacagatagtcttcgttaccatataactgaacgagttccttgtctcgtgacatgactgaaataggtagttgagatatggtatgcaatgtttgaacatgtttaaaatcgaatgtaaccatttgatagaccgccttcattatcatttctagaatttttctttaggtttgtaaagactacaaaataaaatgatgaaaacaactatcttgtggatacactaaaaagacacgctaattagcaaactctctcttcatcatctctcaccattattatactactatttatatgacaaataaaggtgattttgttaaaatataactttgaaaatccacatatatttttaatcttccgtctgaaaaaataaataaaaatagtaaaaataaacacgaatttaaaataagcaaattttttaagaaaatctgtgctaaactttaatagttttgtgcttaataataatcagcacttacaaagaacaaagggaaaagcgaggagagaacttttaatgaaattatcgaagaagttattgttttcggctgctgttttaacaatggtggcggggtcaactgttgaaccagtagctcagtttgcgactggaatgagtattgtaagagctgcagaagtgtcacaagaacgcccagcgaaaacaacagtaaatatctataaattacaagctgatagttataaatcggaaattacttctaatggtggtatcgagaataaagacggcgaagtaatatctaactatgctaaacttggtgacaatgtaaaaggtttgcaaggtgtacagtttaaacgttataaagtcaagacggatatttctgttgatgaattgaaaaaattgacaacagttgaagcagcagatgcaaaagttggaacgattcttgaagaaggtgtcagtctacctcaaaaaactaatgctcaaggtttggtcgtcgatgctctggattcaaaaagtaatgtgagatacttgtatgtagaagatttaaagaattcaccttcaaacattaccaaagcttatgctgtaccgtttgtgttggaattaccagttgctaactctacaggtacaggtttcctttctgaaattaatatttaccctaaaaacgttgtaactgatgaaccaaaaacagataaagatgttaaaaaattaggtcaggacgatgcaggttatacgattggtgaagaattcaaatggttcttgaaatctacaatccctgccaatttaggtgactatgaaaaatttgaaattactgataaatttgcagatggcttgacttataaatctgttggaaaaatcaagattggttcgaaaacactgaatagagatgagcactacactattgatgaaccaacagttgataaccaaaatacattaaaaattacgtttaaaccagagaaatttaaagaaattgctgagctacttaaaggaatgacccttgttaaaaatcaagatgctcttgataaagctactgcaaatacagatgatgcggcatttttggaaattccagttgcatcaactattaatgaaaaagcagttttaggaaaagcaattgaaaatacttttgaacttcaatatgaccatactcctgataaagctgacaatccaaaaccatctaatcctccaagaaaaccagaagttcatactggtgggaaacgatttgtaaagaaagactcaacagaaacacaaacactaggtggtgctgagtttgatttgttggcttctgatgggacagcagtaaaatggacagatgctcttattaaagcgaatactaataaaaactatattgctggagaagctgttactgggcaaccaatcaaattgaaatcacatacagacggtacgtttgagattaaaggtttggcttatgcagttgatgcgaatgcagagggtacagcagtaacttacaaattaaaagaaacaaaagcaccagaaggttatgtaatccctgataaagaaatcgagtttacagtatcacaaacatcttataatacaaaaccaactgacatcacggttgatagtgctgatgcaacacctgatacaattaaaaacaacaaacgtccttcaatccctaatactggtggtattggtacggctatctttgtcgctatcggtgctgcggtgatggcttttgctgttaaggggatgaagcgtcgtacaaaagataactaaataaaaggctacttcttaagtaaccatgtttaagaaaagagaaatagccttatttctctttttgtcgtttttaaaataaaggaacatcatgaaacaaacattaaaacttatgttttcttttctgttgatgttagggactatgtttggaattagccaaactgttttagcgcaagaaactcatcagttgacgattgttcatcttgaagcaagggatattgatcgtccaaatccacagttggagattgcccctaaagaagggactccaattgaaggagtactctatcagttgtaccaattaaaatcaactgaagatggcgatttgttggcacattggaattccctaactatcacagaattgaaaaaacaggcgcagcaggtttttgaagccactactaatcaacaaggaaaggctacatttaaccaactaccagatggaatttattatggtctggcggttaaagccggtgaaaaaaatcgtaatgtctcagctttcttggttgacttgtctgaggataaagtgatttatcctaaaatcatctggtccacaggtgagttggacttgcttaaagttggtgtggatggtgataccaaaaaaccactagcaggcgttgtctttgaactttatgaaaagaatggtaggactcctattcgtgtgaaaaatggggtgcattctcaagatattgacgctgcaaaacatttagaaacagattcatcagggcatatcagaatttccgggctcatccatggggactatgtcttaaaagaaatcgagacacagtcaggatatcagatcggacaggcagagactgctgtgactattgaaaaatcaaaaacagtaacagtaacgattgaaaataaaaaagttccgacacctaaagtgccatctcgaggaggtcttattcccaaaacaggtgagcaacaggcaatggcacttgtaattattggtggtattttaattgctttagccttacgattactatcaaaacatcggaaacatcaaaataaggattagcatgggacaaaaatcaaaaatatctctagctacgaatattcgtatatggatttttcgtttaattttcttagcgggtttccttgttttggcatttcccatcgttagtcaggtcatgtactttcaagcctctcacgccaatattaatgcttttaaagaagctgttaccaagattgaccgggtggagattaatcggcgtttagaacttgcttatgcttataacgccagtatagcaggtgccaaaactaatggcgaatatccagcgcttaaagacccctactctgctgaacaaaagcaggcaggggtcgttgagtacgcccgcatgcttgaagtcaaagaacaaataggtcatgtgattattccaagaattaatcaggatatccctatttacgctggctctgctgaagaaaatcttcagaggggcgttggacatttagaggggaccagtcttccagtcggtggtgagtcaactcatgccgttctaactgcccatcgagggctaccaacggccaagctatttaccaatttagacaaggtaacagtaggtgaccgtttttacattgaacacatcggcggaaagattgcttatcaggtagaccaaatcaaagttatcgcccctgatcagttagaggatttgtacgtgattcaaggagaagatcacgtcaccctattaacttgcacaccttatatgataaatagtcatcgcctcctcgttcgaggcaagcgaattccttatgtggaaaaaacagtgcagaaagattcaaagaccttcaggcaacaacaatacctaacctatgctatgtgggtagtcgttggacttatcttgctgtcgcttctcatttggtttaaaaagacgaaacagaaaaagcggagaaagaatgaaaaagcggctagtcaaaatagtcacaataattcgaaataataaaatcagaaccctcatttttgtgatgggaagtctgattctcttatttccgattgtgagccaggtaagttactaccttgcttcgcatcaaaatattaatcaatttaagcgggaagtcgctaagattgatactaatacggttgaacgacgcatcgctttagctaatgcttacaatgagacgttatcaaggaatcccttgcttatagacccttttaccagtaagcaaaaagaaggtttgagagagtatgctcgtatgcttgaagttcatgagcaaataggtcatgtggcaatcccaagtattggggttgatattccaatttatgctggaacatccgaaactgtgcttcagaaaggtagtgggcatttggagggaaccagtcttccagtgggaggtttgtcaacccattcagtactaactgcccaccgtggcttgccaacagctaggctatttaccgacttaaataaagttaaaaaaggccagattttctatgtgacgaacatcaaggaaacacttgcctacaaagtcgtgtctatcaaagttgtggatccaacagctttaagtgaggttaagattgtcaatggtaaggattatataaccttgctgacttgcacaccttacatgatcaatagtcatcgtctcttggtaaaaggagagcgtattccttatgattctaccgaggcggaaaagcacaaagaacaaaccgtacaagattatcgtttgtcactagtgttgaagatactactagtattattaattggactcttcatcgtgataatgatgagaagatggatgcaacatcgtcaataacgatgttgtgaatggcttacttatcaaataggtgactaatgatgattgtgaataatggttatctagaagggagaaaaatgaaaaagagacaaaaaatatggagagggttatcagttactttactaatcctgtcccaaattccatttggtatattggtacaaggtgaaacccaagataccaatcaagcacttggaaaagtaattgttaaaaaaacgggagacaatgctacaccattaggcaaagcgacttttgtgttaaaaaatgacaatgataagtcagaaacaagtcacgaaacggtagagggttctggagaagcaacctttgaaaacataaaacctggagactacacattaagagaagaaacagcaccaattggttataaaaaaactgataaaacctggaaagttaaagttgcagataacggagcaacaataatcgagggtatggatgcagataaagcagagaaacgaaaagaagttttgaatgcccaatatccaaaatcagctatttatgaggatacaaaagaaaattacccattagttaatgtagagggttccaaagttggtgaacaatacaaagcattgaatccaataaatggaaaagatggtcgaagagagattgctgaaggttggttatcaaaaaaaattacaggggtcaatgatctcgataagaataaatataaaattgaattaactgttgagggtaaaaccactgttgaaacgaaagaacttaatcaaccactagatgtcgttgtgctattagataattcaaatagtatgaataatgaaagagccaataattctcaaagagcattaaaagctggggaagcagttgaaaagctgattgataaaattacatcaaataaagacaatagagtagctcttgtgacatatgcctcaaccatttttgatggtactgaagcgaccgtatcaaagggagttgccgatcaaaatggtaaagcgctgaatgatagtgtatcatgggattatcataaaactacttttacagcaactacacataattacagttatttaaatttaacaaatgatgctaacgaagttaatattctaaagtcaagaattccaaaggaagcggagcatataaatggggatcgcacgctctatcaatttggtgcgacatttactcaaaaagctctaatgaaagcaaatgaaattttagagacacaaagttctaatgctagaaaaaaacttatttttcacgtaactgatggtgtccctacgatgtcttatgccataaattttaatccttatatatcaacatcttaccaaaaccagtttaattcttttttaaataaaataccagatagaagtggtattctccaagaggattttataatcaatggtgatgattatcaaatagtaaaaggagatggagagagttttaaactgttttcggatagaaaagttcctgttactggaggaacgacacaagcagcttatcgagtaccgcaaaatcaactctctgtaatgagtaatgagggatatgcaattaatagtggatatatttatctctattggagagattacaactgggtctatccatttgatcctaagacaaagaaagtttctgcaacgaaacaaatcaaaactcatggtgagccaacaacattatactttaatggaaatataagacctaaaggttatgacatttttactgttgggattggtgtaaacggagatcctggtgcaactcctcttgaagctgagaaatttatgcaatcaatatcaagtaaaacagaaaattatactaatgttgatgatacaaataaaatttatgatgagctaaataaatactttaaaacaattgttgaggaaaaacattctattgttgatggaaatgtgactgatcctatgggagagatgattgaattccaattaaaaaatggtcaaagttttacacatgatgattacgttttggttggaaatgatggcagtcaattaaaaaatggtgtggctcttggtggaccaaacagtgatgggggaattttaaaagatgttacagtgacttatgataagacatctcaaaccatcaaaatcaatcatttgaacttaggaagtggacaaaaagtagttcttacctatgatgtacgtttaaaagataactatataagtaacaaattttacaatacaaataatcgtacaacgctaagtccgaagagtgaaaaagaaccaaatactattcgtgatttcccaattcccaaaattcgtgatgttcgtgagtttccggtactaaccatcagtaatcagaagaaaatgggtgaggttgaatttattaaagttaataaagacaaacattcagaatcgcttttgggagctaagtttcaacttcagatagaaaaagatttttctgggtataagcaatttgttccagagggaagtgatgttacaacaaagaatgatggtaaaatttattttaaagcacttcaagatggtaactataaattatatgaaatttcaagtccagatggctatatagaggttaaaacgaaacctgttgtgacatttacaattcaaaatggagaagttacgaacctgaaagcagatccaaatgctaataaaaatcaaatcgggtatcttgaaggaaatggtaaacatcttattaccaacactcccaaacgcccaccaggtgtttttcctaaaacagggggaattggtacaattgtctatatattagttggttctacttttatgatacttaccatttgttctttccgtcgtaaacaattgtaaggtgtcgttgaaattattaaataatagaaaatgactagttttggcctttccctattgtcagtcagattagttattatcaagcttctcatgccaatattaatgcctttaaaagaacagttacaaccattgaccgtacggagattcaacgacggttaggtctggctaaagcctacaatgctagtatttctggaacaagtagtcagtcgactcaatctgtgctgagagattcttattctgaggagcaaaaaaggcagggtggactgaatacgctaggatgttagaagtcagagagcaggttgaccatgtgatgattccaaaaatcaatcaggatttaccaatctacgctggttcagaagaggacaatctgcaacggggagttggtcatctagaagggataagtttgccgattggaggggcttctacacatgcggtcttgagcggtcaaagaggtatgccagctgctcggttgtttgcggatttggataagatgaaaaaaggtgattatttttatgttaccaatctgaaagaaaccttggcttatcaagtggatcgtatcatggtgattgaacctagccaattggatgccgtgagcattgaagaggataaagattatgttacccttctgacctgtacaccttatatgggctctttgtcaactgtaatgggtgacttatcattaacaacgagagagaatcagcttggttctctctctttttggatgttcaaagcgatgagaattttgcttttaaaatttttaaagttgcgaaagccaaaggcttgtcgcttgatgtctttgataagcttgttggtcgcttctaatttggcattggaaagggatagctgagggcgtttgtgatgtaagttttgtacttcatgaaggtcctaaagaccattttaaaagcagaattgccagttgttacgttatcatctatgaagctaaagaattcagttgttcgcttttcttagaaatgaaagagtatgagctgataaaggtcgttataatagcggagctcatctgagaaaacttttatacctcaaagtcagtctagctttgatatcatgaagccattaggagttattccttatcttttagtggcgcgcgatccatatagtgatagatcgagatatttagatccaaaagttctatcatcctcttttggcgccttttttccagcagataatattaaggtagcttggtctaacaactccagcactttatttacaccacctattaatgcaaactacaccactcagattcaagctattgggacaacgattaagtcacaaattccggaatcgattttgacggttacggataaaaagagcaggaagttcagcattaacaagattgacgaagctaaagaaggcttagtaggtgcgaccttcaccttgtctaaacgcacaacagtagcggcagatcatcaagtacaaggagatttcattcctgtcagcaaagagacgacagtcggtcggacaacccttacctttgacaaccttaaacctggattttatgaccttaaagaaacgaaagcgccgaatgcttacgtacttgatcctaagacttatgttgtggtcgttcaaaattcaggaaaaacgacaattgtggatgaagctaacttcaaagaggctgattacccaatggctgataataccagccatgtggagtgcgtagcgttgctacaacgaagcaaagggtaaaaatcctttattttaagcactttttcaagcattttgtctttattgaaaagagtgattttaacataaaaaaggtattaaaaaacatattgacgtgaccgtttgttttgaagtggcttgcgtagacaaaaaaatagatacgtcagataaatttctggcattacgagaacatttttagagtgttctctttttttagtttacggaggaaaaatatatatggaaaaacaggattcacgagttctcatccattgggaggggaattctggggacaagctcattgaacaccaaaccagcgcaacggggtggtactaccaagtcgatcgtagctttagtcaaccaaaaggggaaccgcccagaatgatccaaaggcactagaaagtgtccgtaatgattcgatttcgggcggtgatgatgtcatgggttatgcttatagcaaatgtacttggggagttgcggcacgaattaatcagtgggactgaaactcaaaggttgaaatggtgagaagattaccattaccagttcaatgggaaatggtcaggattgggttggaacagccgaaagactagatggtgaaactgatacagttccaaaagaaggtactattctctctttttaggaaagtagttatggttcgtatataggctacggaactatatctttcgtcacattacatctacagatagtaccatgaattttgcttatatgaccaagtaaagtgaggatatactaacaaatgaaatatttattatcgtatttgtccattttatcgaaaagtttgcatattatcattatgtttgataagatgcaaatataatgatagtaggagctaaatatggatatttaaaaaatcaagagtatcctaagtgctttccattttgaaattcaaatatagctaatagttctagaacttctaattgtttttcgtcgacgatatgaattttcaatcttaactgttaggattccacctccctttggttaaagaaaaaaggtcaggtcgtttagataactttgtcaaacaagctcaagctatctaaaaatagtttgaaatgggcattactctagtttttaataagctatctgatgagcagaaggagaagttaatgcatgttgggaagtcttattttgactatcaagaaaatgctcttatcccacaattaggttttctatattctaaattaactaaaaaaattgaacttgataatcggttgtctccgactgaaaaaaagttattgattaccttattattacatactaaaggtttaatcattgatatgtaagaagtaagtcagctaaccgatctttctattctaaaacttatattgttgctttagaaattttaaagagcgtggatggcttcataataaacagaaatcttaccaatttgcgaagccaaaaaatatgatatttgaagagtccaaagatctaatagatagtccagttagagaagcgttgattataagtgataaggattttcaaaaattaaaacaagagctattattttaaccgacttattttaaagacttatcatatctaggcttgcttgatgattcggaaaaatacggagactatactatttcaaggaaaagatacaaaagtttcgaatcaagtcttcaactatacatccttcaaagtcatcggctagagatttggaattatgaaccaatccctttgattactagaaaaataaatagcttggagaggctaacgtgacactggttgatccaatctcgctttatttaacactaagaatgatgaagaccctcgtattgaagaagaagttgagcagctagaagataagattttgagaatataatcgttttttcgtgctacactaacttgtcagggttgcaacagacaaaaaaataatttaggagggattcgttatgcgtacaaagtatataggatatgaaattgttttaaggggtggttattaatatggataagaaaaaggttgtttcaactatcgtatctacagggtttcttatagtttcaatatcaaatttttttagagagctatcacctatactttttctcttgaatattattggatttttctgcttcctattattattttctgccaacataaataaattgttcttaaaacgatagccgttatataggatatggtatgtatgcatttggtgaaattataggtaaaacgaatggaatagtacttactcctcaaagctatcgtgagaggtataaaaggatatcgaggagtcactagatagttggatctcattgaaaaaatttgtttaaagtatctcatataagcataaaacgaggaatcaatcaaaatttcttgattgattccttgttttttggctctttgtcaactgtagtgggttgatgaaaaattatattctggagaaaaccaaattggttttctcctttttgatattcaaagtgatatgaattctctttttaaaatattcaaagtttctaaagctaaatgtttgtgcttgatgattttgatgagattattggttgctcaagtttggtgtttgaataaggcgattcaaggacattgataaccttatctctgtctttaaaaaatgtcctaaaaacagtttaaaagattggagtgacactagagaaagtgttttaaacagggtaaagaaatggtgagcttgcttctcttgaaagtaaagcaggaggagttgatagagtttcataatgttttttatagagaagcgatatcttcttatcttgaaacagaaaattttgagaaggctaaagtgactgaagagaattaccaagtttttttaggaatccgtacttatcagaagagttataactatcaagatcatagtgagaatctaaaaggaaatattgaggtagcaatgataggagttgaaaataatattagcgacgaacatattttttgctagaatatataaaatgtctttgaaataatttagccctgtgttatgatattaaggaggttatttatggtacgtaaatttttaaaatcgctcctatctctctttcttatagcagtaatcgccaccggtatttcagtggcatgtttcttttttattccagaaaataaagggaatattacaccgattttattgcatcgctttatgcgaaaaaataatgttaatggaatgatgattgttagcgataatactggtaaaccgattaccatctcgcatgggattaaccgtggggaagttgaaacggatattgaaaataataaattatttccaatggcttctctccaaaaactcatgacaggaattattatccaaagattaattgatcaagatgtcttgagtgaagacgaccgattgtctcagttctttccccaagtaaaaggtagtaatagtattaccatccaccaattgttgacccatacgagtgggttaagagaaaaaggtgttaaggtgtctccttatctaaaaaatgagagagaacaattacaattttgcttaaaacactataactttgttaataagaaatcgtggtattattctaatatcaactttagtttcctaacaggtatagccactcaagttacgggaaggacctacgctgaacttgttgatgatgtgataaaaaatcctttgcgattagatgatacccaaagttaccaatcagttgttaatcatgacttagttagcccaatgcgaaagaacggcaagttaaataaaattaatatctttaatcaagtatccacagcatatggagctggagattttttcacaactccgctgaacttttgggtgttgatgcggtctttttctaaagggtactttttcccaacggatgaatataccaaacatcaaaatgatgcgatatcacattattatggtgggctttacatgcatggtcgtatagttaattctaatgggacctttttccagtattcaagttttggttatgcagatctaaagacgcatgatacaatggtgctttttatgaataacaaagtctatagtgatgctagtcacgtggcaccaaaagcatttgaatattatcaaaaatttatgttccttaataagattttccacttagtcttttactttgtattttctttctttttaatgcttttaatacgtcattcgtttaggaaaagaaggtataagaaacgtctctaaatcacatgaataaaaaagaaggctaagttggccttcttttttattcaatattaagcagtaacaccatctaagaaaacgtttgcattgaatttttaattgtgctataataaatagctgttaatcattattatagtttaataatctaactgtcgagctgatttaagctataaaaatactgttgagtaaaagaggtattaatatgtcaatgattgaagtttctcaccttcagaaaaattttataaaaaccgttaaagcaccagggttaaaaggagcatttcaatcatttcttcgtcctgaaaaacacacctttgaagctgttaaagatttaacatttgatgtgcctaaaggacaaattctgggatttattggagcgaacggtgcaggaaaatctacaacaattaaaatgttaactgggattttaaaaccaacttcgggcttttgccgtattgatggcaaattgccacaagaaaaccgacaaaattatgttaaggatattggagtcgtttttgggcaacgtacgcagttatggtgggatttagctctacaagaaacctatacagtgttaaaagaaatctatgacgttcctgataaagaatttcgcaaacgcatggcttttttaaatgaggttttggaactaaatgactttataaaggatcctgttagaactttgtctctcggacagcgtatgagagcggatatcgcagcttctttattacataacccaaaggttcttttcttagatgaacccaccattggcttggacgtttcagtgaaagataatatccgacgtgcaatcacacaaattaatcaagaagaagagacaacgattttactaacgacacatgacctcagtgatattgaacaactttgtcatcgtatttttatgattgatagaggacaagaaatatttgatggcacagtttctcagctaaaagagacatttggaaagatgaaaactctttcttttgatttgcgcccaggacaagagcatatcagctctagtttaattggaaagtcggagattaatattaaacgtaatgacttagttttagatattcagtatgatagttctcgctaccaaactgctgacataattcagcagacattagcagatttttctgtacgtgaccttaaaatgacagatgcggatattgaagatatcattcgtcgcttctatagaaatgagctataaggatgaacagaatttggagacgttataaaccttttattagtacaggaatccaaggattaatcacatatcgtgttgatttcatcctttataggataggtgatgtgataggagcatttgttgcattttatctatggaaagcagttttcgattcctcaagtcaatccttaatccaaggttttcagctgtcagatatgattctctatattattatgagttttgtgactaatttattaacaagaactgatagttcatttatgataggtgacgaagtaaaagacggttcaattattatgcgactcttacgtccagttcactttgctgcttcctaccttttcatggagattggttctagatggctcatctttttaagtataggggtaccgtttttgcttgttattacgggggtacgcctcttcttggggactgatttgattcaagctatagtgttagtggtattttatattattagcattattttagcttttttgattaacttcttttttaatatttgttttggcttctcggcatttgtttttaaaaatttatgggggtcaaacctgttaaaaaattcgttagtcgcatttatgtcggggagcttgattcctcttactttttttccgaaaatcgttgctgatattttaggatttttaccattttcatctttaatttacacaccagtaatgattattattggtaaatatgatggcagtcaaattgtgcaagccttacttttacaaatattttggctaatagtaatggtagctttatctcaattaatatggaaaaaagtacagttgcatatcactatccaaggaggttgagatgacaaaatatcagcgaatgcactttatttttattaaacaatacatgaagcaaatcatggagtataaaatagacttttttgtaggcgttttaggagtatttttaacacaagggttaaatcttttatttctgaatgttctttttcaacatatcccttctttagaaggatggacttttcagcaaatagcttttatttatggtttttctctcctcccaaaaggaattgatcaccttttctttgataacttgtgggctcttggtcaaaggcttattcgaaaaggagaatttgataagtatttaaccaggccgatcagtcctttatttcatgtcctagttgaaacctttcaagtagatgcattgggggagttattggttggttttattctgttatctaccacagtatctagtataagctggaccgtgccaaaagtattattatttatatttattatcccctttgcaactttgatttatacctccttgaagattgctacgtcaagtatcgctttttggaccaaacaatctggtgctgttatctatattttttatatgtttaatgactttgctaagtatcctgtcgcaatatataataatctattgcgttggatcattagttttgtcattccatttgcttttacagcttattatcccgctgcttacttcttacaagatagaaatgtctattttaatattggtggggttatcttgatttccttgatttcttttatggtatcactaatactttggcataaaggagtagaagtatatgagagtgcgggttcttgattagtaaggcaagccattaatttttttgagtgtttagaagttttaggcttactaacttagctttgttagtgatgatatactccccttatagtgtctagtgaatttttgtttttttactgtccactataaggggagtatatcaggtgaagagggactattagtgttgagaataatgtccctcatagaacaataattaccatatctttaccaaaataaagttaaaaacgctcttagatgtgctttctaagagcgttttttggtctataaaaggtaagcaaaaagcagatgtcatttatgaaagtgttgacaaagatgaaatactttgttactattttaacataataatgatattttaattagagtgtgaatttataattaatttttataatgtttattttaaatttaaactaatgtttatagcagtgttttactcatgattttgtgaattcaacacttaagtcatgacctcattttaaagagtttcagacgacacagaaaggaagaaaacataagaaaggcaatgcacggcttgtccatagtagtgtttgaagtagatgtttagaaatattttattttccaacagtactgatatcagagcgaagatgattagttgaaggtgataatatgggacgttctaatattttgagtaggtgtgaacaatgttctgataatcaatgtggcttgtataaaacgcggcttaaagacaagttactattagtagtccaactggttggaaatattaggtattctgagtttcttacggaaggtggtgtatatcataagggagaaaccttgttggaagttataaccttaggaatttcttatgaatataaaagttatggggatatcaaagtaatcaagaagtactgtgctgatggcagtgtcgttgattataacatgccaatactattaatggaaaggattgaataatgaaaacagtaataatatatggaggacagggtaatgttcagtcaaaacacctttgtcaactagttaaaactccaaaaggtgaaattcttttttcaaagttacaagcaactgatttagaatcatatcagttaatgatggatgtcattaaccacaaggtaagtttagacaatgttcatgcgtctatgttagcaaattttttatataatgattggctaacaaacgatgaaaaaatagtatctgggataggattttcagctcatagcgccggtattttcaatgtgttatatgctagtggtagtactagttttgaaaacattattcactttattaaacgtcgtgcccaacttatagaaaattgtcatgtgtctgaagagctttggcttttgatggttgaaaacattgatatgtttagtaaggatgttttaaaagaacagtctgagaaagtaaaattagctattattactgatgatagagctggtgtaattgctatggatcaagtcaaccgttctttctttgatgacgtgatgactaacaaaggttatttttataaattaaagcagttaggcgtaaaagcaccatatcatactgattttttaaatgaatctaaagagcagtataaacaattgattgaaagcctagatatttcgcaaaatgatgactatgactatatttttcattgtgatcaattggtagatgaaattttatatcagtggaccaatctctttaactggcgtgcgattaaggaaactatcatagaaaaggatgcggagattattgatatttctcctaataggtttatttctagtcagttgcaaaaaatgaaaaagagggggaggaaacagttatgaaagtagcaatagttactggtggtaccagaggaattggaagggctattacaaaagagttatacaaagaaggttacaaagtcattgctatttataatagcaatgatgctaaggcaagagctttacaagaggagttaccaaaattagacgtttataaatgcaatatttcagatgcaaaagcagtacaaaaattggtgactaaaatttttagagaatatggcggtattgattgtttagttaataatgctggtattgttagagatggctttttcttgatgatgtctaaggaaaaatggatggatgtcattaacataaatattatggggctagttaacatgagtaaagccgtgttaaaaatcatgaaggctaagcgtatacagggaaaggttatcaatatttcttcaactagtggtatagcagggcagatagggcaagcgaactattcagcaacgaaaggcgctatcatttccattactaaaactctagcgaaagaatttgcatcagatggtattacgattaattgtgtaagtccaggattcattgaaacagatatgacaaatgaattgcaaaataaagaagagctaaaagagcatcttattcctctaaaaaggtttggacaacctgaagaggtggcttggctcgtaagctttttagcaagtgagaaggcaaactatattacaggaaaaaatattgtgattgatggaggaatgattaatgattaactgggctgaagaacgtaaaataataaaaacacgtcaagaagtagttgatgaaattaaaggtattttgattgactctttaatgttggatattgataaagatctgattatgaatgatcaaccattatttggtcgtggattagagctagactctattgatgccctagaactgtcaatagggatttcaacaacgtttggtgttgaactaaatgatgatgatatttcaatattatcatcagtaaatagactagcagattttgtgattgaaaatagtgaggatatagatgaccaagctaagtagtgaagaaattataaaaatgttacctcatcgctatccgtttctaatggtggatagagtgcagagttataaaaaaggtatcattgaatgtcgtaagaatattactatcaacgaaccttactttcaaggacattttccacaacgtcctatagttccgggtgttttgatgattgagatggcagctcaatctgcagctttactttatattttagatgcacttgatggtagcctcccctctcttgatgaattaacagcagagaaaatagcagaaaaagtaggttatttagccagtgtgaagaatttcaaattcaagaaaattgttactccaggagaccagctaaacattacatgtaaatctcaatcaaaattggggcatcttttagaaattcaagtcgttattagagatgagaataaaaaagaggttgcctcaggaaggatgttggtatcagaaaatggaaattaaactcaaaaatattggaaaaaaatatggttcttttgaagcattgagagacattaatctcatctttgaagagggaaaattttatggccttcttggacctaatggagctggtaaaacaactttatttaaccttttaattcaaaattttaagcaaacgtcaggcgatattaagtgggaggtggatggaaaacctctatctattaaagatttttatcgtcacattggtattgtcttccaaagtaatcgcttagatgataatttaacggttgaggaaaatctaatttctagaggtgctttgtacggtttatctaaatcacaagtacgtaatcgccttaaagatcttcaaacgtatctagatatcacagcaataaaaaaacaaaaatatggcagtttatcaggaggtcaaaaacgaaaagttgatattgcacgcgccttgctgccacaaccttctctattattattagatgaaccaacgactggtttagaccctcaatctcgtcgcgatttatgggatgctatcgcacaactaaatcaacaatcgcagatgacagttgtactaattactcattatcttgaagaaatgtctgcttgtgatgttttaaatgttcttattgaaggaaacatttattattcgggagatattaaaagctttattgagcaacattccacaacaaacttgaatgtggtattgaaaccagaaaagtcattagaccaactttcgatagctgattttgttaataaatgtcaagtcctttcagaaagggagatagtatttaaggatatttctgttgaggaaatgatgcaggttatctcagacaatcaagataaatctattattgagacatttaatgttgaatattcgaacttagaggcggcgtatctcaacttgcttagagaaaaagaaaggaaaaacaatgtttgaactaatttctagaaatcgtaaagtttacacgcgagatcggttagcgtttttcatgtcttttttatcagttattatcttaattttggtctatcagattttcttgggaaaaattcaattagatgctataaaagcagcattgaggagtaatacagtatccagtgatactattcacatggttaattattggctcattgcaggtttgacgactattatttcaatgactagtacattaggtgcctttggagttatggtgtccgacaaagaaaaaaaattaaatgaagattttaaggtcagtcctatatcaaatatcaaaattgaattgtcctatgctatatttgccgttttatttggtattgtcatgacgatgttctcttgcatctttgctatcggtatttttaacggctttaattccttgctagagtattcagctatggattatttaactattttagggatcgtttccttagggactgttttatctgcggcgatgattttacctattttagcctttattcatactagttcagcttttacgactcttagcacaattgtagggacttttattggttttatttcaggagtatatctctcaattggctcggtaggaaaagcattacaacaggttatgacatggtttccattgactcaaatcaattctcttttgaaacaggtcttaatgaagggttctattgcgaaggtatttgacaaagccaacgaagccactgtctctaactataaagaatcatatggtgttgttttgcgtaatgctgatggagaaaggctgagtaatcactttatgttgatttatatcattgccctcattcttattttattggcaattcattttattattaaaaaggttaaaaaatgaaagatgataataaattaaagatttctgaagcttccttagaagattattctgaagtggttcatttatttaataggaatcatgtttatcaatttccagacggtaggcctttaactgttgatgaccttgatttaacgttaaaagttaaagaagtgacacatttatttttactgaaaaatcatggtgttttgattggaacatcagctttctttaaatttattacctatggttgtttagattggaatagtagctttagtggttttcttttaattgattcgaaaagtcgtagtggacaggcaatcacttatctatataaaactatcttaaagaagataacaaaactgaagttttctaatatctataccgaaatcagtaactacaataaaccctccttagctttatcaaaattgaatggcttcaaagagtatgataagacatatgaagacatactgcattgtcgatcattgcgtagtcacctccctaagatattgaatacgtttcgtatttcgaattattatggtaaaacatacgacatatcaacttttcaaattatggaggaaattgaaaatcccttggaagaggagacagaaattaggaccaaagtctctgatgaagaaatattatttaaagcagaagatagtgcttcacttccttattatttaaaaatgagcttgtttcaaatggaaattgctaagttagataaccgttatgttttacaagttgactttttatcggaacaagtaaagagggttcgggttaaaactggaaaatatcacttggcaaacttaacgagggctcaccctagcctaactttaagtcgttttgccaattattattacattcaagcaactgtggaaaccctttatggtaatatcgatgttcaactggaacgtcgaaaaaagcattatagagatgcaactatttgtcttaagagaacttttcaaggttatgatttacttatctctccaaatggcagccttatttttgaaaagcagaaaagaaagatacttgaagatagttttttgatttttagccaacctttggacaagaaattagttgtaaaagaagaagaaaatcacattacaatcaaatgtttctatcaaggtgctttaattgagaaaatcatgacatttacaagtgacgaagaaatcacttgtgtttataaatgtaatcaaaaggctaaagagatgttcccaaaattattgaaacagactttcaagttacactgccaagagcagttgattagagatagtgaaggttatcttgtgaatgttccaggaagttacccgattgagcatgatgattttcttcgagcagataagtttgaagatagacaattccattattacctcccgaatgaagataaaatgatttcctattctcctcctggcaaagccagcaatcaaatgcaatttagacccttatgtcttattgatacagatagcctttcttttccactgacttatcattttaggatttcacaagcatcatcggaggaggcgttaatcaatctaaaaaaacagccaatatgggacagcaactaccaagcgtcagcaactgaccttttaaaacatatctctaacctaacattagaagaagagaaggattatggcatcaagagaatgatagctaacagaaagcattatcctagtcacaaactggttttagcctataatcagattgttttgcctaagaatgaaattccaagagacagtgaattatattctatttcttttgattatcgaattagaggaaagtttgtccaaatccgccaaggggaacatgtcaaatatgataataaatcctatgttttggaaaatagtcaacaattagtattgtatgtagctagcgatgataaatatatactaatttctgctaaaaatggaatattttattcttacaaagagaacaatcatttaaaaataaggtgcatgtttaaaaggaactcaccttatgctacaaatgtgagcattacagaatatagaaagtgtgaagaaaaatgaatactatttataatacattgagaacagataaaggttataaagtttatgaggggtatttatatgaaattactggtgaagaatgtgaagaagccttagaccttgtgattcctaagaatattgtatttgcagatacagatacttgtggctacacttttttactcaatgaagatggaacagtttatgatgatgtgactttctacaaatttgatgataaatattggttggctagtcataaagctttggattcttatttagacaacatcaattttgactataccgtaacagatatttctgacgagtataaaatgctgcaaattgaaggaagatattcgggagaaattgctcagtcattttatgaatatgatatttcaacacttaattttcgtactttgatagagatgacttataaaggtgagaaaggttatcttgctagatttggtttttctggagaatttggctatcaatttttcctaccatcttctatttttgctacttttgtttcggatgtctgtgaaggtatagcagagtatggggatgaacttgatagatatttaaggtttgaagtgggacaacccattactgatatttatcaacaagaagaatattctttatatgaaataggttattcttggaatctagatttcacaaaggaagaatttagaggtcgcgatagcttgttagagcacatcagatcagcaacagttaaaagtgttggattctcaacgaaggaaaaactcgcttcaggaacaccagtgctatttgatgaccaaattgttggaaagattttttggatagcagacgagaaagactcttcggaaaattacctaggtttgatgattgttaaccaaacatatgctcattcaggagttacttttgtaacagaagatggccaaattttgaaaacacaatcaagcccttattgtatcccagaaagttggaacaaagaatgagcgtatatgttagtggaataggaattatttcttctttgggaaagaattatagcgagcataaacagcatctcttcgacttaaaagaaggaatttctaaacatttatataaaaatcacgactctattttagaatcttatacaggaagcataactagtgacccagaggttcctgagcaatacaaagatgagacacgtaattttaaatttgcttttaccgcttttgaagaggctcttgcttcttcaggtgttaatttaaaagcttatcataatattgctgtgtgtttagggacctcacttgggggaaagagtgctggtcaaaatgccttgtatcaatttgaagaaggagagcgtcaagtagatgctagtttattagaaaaagcatctgtttaccatattgctgatgaattgatggcttatcatgatattgtgggagcttcgtatgttatttcaaccgcctgttctgcaagtaataatgccgtaatattaggaacacaattacttcaagatggcgattgtgatttagctatttgtggtggctgtgatgagttaagtgatatttctttagcaggcttcacatcactaggagctattaatacagaaatggcatgtcagccctattcttctggaaaaggaatcaatttgggtgagggcgctggttttgttgttcttgtcaaagatcagtccttagctaaatatggaaaaattatcggtggtcttattacttcagatggttatcatataacagcacctaagccaacaggtgaaggggcggcacagattgcaaagcagctagtgactcaagcaggtattgactacagtgagattgactatattaacggtcacggtacaggtactcaagctaatgataaaatggaaaaaaatatgtatggtaagtttttcccgacaacgacattgatcagcagtaccaaggggcaaacgggtcatactctaggggctgcaggtattatcgaattgattaattgtttagcggcaatagaggaacagactgtaccagcaactaaaaatgagattgggatagaaggttttccagaaaattttgtctatcatcaaaagagagaatacccaataagaaatgctttaaatttttcgtttgcttttggtggaaataatagtggtgtcttattgtcatctttagattcacctctagaaacattacctgctagagaaaatcttaaaatggctatcttatcatctgttgcttccatttctaagaatgaatcactttctataacctatgaaaaagttgctagtaatttcaacgactttgaagcattacgctttaaaggggctagaccacccaaaactgtcaacccagcacaatttaggaaaatggatgatttttccaaaatggttgccgtaacaacagctcaagcactaatagaaagcaatattaatctaaaaaaacaagatacttcaaaagtaggaattgtatttacaacactttctggaccagttgaggttgttgaaggtattgaaaagcaaatcacaacagaaggatatgcacatgtttctgcttcacgattcccgtttacagtaatgaatgcagcagctggtatgctttctatcatttttaaaataacaggtcctttatctgtcatttcgacaaatagtggagcgcttgatggtatacaatatgccaaggaaatgatgcgtaacgataatctagactatgtgattcttgtttctgctaatcagtggacagacatgagttttatgtggtggcaacaattaaactatgatagtcaaatgtttgtcggttctgattattgttcagcacaagtcctctctcgtcaagcattggataattctcctataatattaggtagtaaacaattaaaatatagccataaaacattcacagatgtgatgactatttttgatgctgcgcttcaaaatttattatcagacttaggactaaccataaaagatatcaaaggtttcgtttggaatgagcggaagaaggcagttagttcagattatgatttcttagcgaacttgtctgagtattataatatgccaaaccttgcttctggtcagtttggattttcatctaatggtgctggtgaagaactggactatactgttaatgaaagtatagaaaagggctattatttagtcctatcttattcgatcttcggtggtatctcttttgctattattgaaaaaaggtgataaaatgagtaaatttttatttgctcctttcatgatgaatttaggagagagccaaagattatcaaaactggctaattgtttatatgaacaaggacatgatattcatatccttggagacaattattatccatttttatttaataatgatgcttatcgctatcaccactgtgtagaagataaatctgtttataatagtaagcgatatgatgctttcttttctctttcaacagactttaattttttatcagaagaagaaattgaacgcatctgttctattgaaagagacttgttacgccaagaaaaatttgatgctgtattgacaggttaccgtctatctattgttacaagttgtcgtttagaaagcataccattaatttggattatttcaggggcaacgcatatcagtgaaattgttgaaaactcagaaggaatattgcctaatgggaagataagtaaagctagtaagcctcaaacaaaggattttatcaaaagagtaatcactacttattcaacaaatgttaaaacgtggaataactatattaaaaaatatggtggcaaaacttttaataatgctttagaattatttactggtgatctaaacttggtaacagattactctttgttttatgaatttgataaagattcgtcctataaaacgataggacctattttgatagataatgtaggtttttcaaaatgcagccaaattaatcaagacaataagactgtactgctcagctttggtacttcatttaaacgagattgggtggaatcttttttaaagacattaccaaggcattatcattatttactgacaagctgtggtgaggctataaacattccaggaagttatattgagatagttgattttattgattttaaaaccatagataaagagatttatttcgctattatacacggtgggcaaggaacagtttatgcgatggctgcacaaggtattccctttataggtatccctttctttaacgaacaattttggaatattaagaagttcagtaaagaaaagtgcgcttatttggtaaagaaacctgatgtaagagagatacgtaaagcaattagctgtcttgaaagagactatgatatctataaaagttatatgataagactaagccaaggaattaaagaagaagcagaggcatctttacaaaaagcggaggcagaaattgaatcctttatcagaaaaagacaaagttaactatattatgatttataaaaataggcagtctacattggagaataatttatctggcgatcggttgatgagatatcaacaagcaaatagacaggtaagcaaagataaactgttaacagggagttattttgtgtaccaatgcttaaaaaagttaggttttaccaataagatttgtcaggaatctttttctagtgttagtagttatttaattggtttgccaaaggggaaaattagttactctaattctggtgactatcatattctaacctatgctcccagtggttcaactggggttgatattgagaaatacaaagatagatcagaacaaacctaccaaaactacctaggagaatcagttagtagtgatatggattctaaattattattttataaggcatggttacaaaaagaaatttcctataaatgtgggaaatctatagatattacctatcaaacaatgatagatggctatatttatggttatgcttttgataatacttttaaagtagaagcggtttacttaaaagaattattaccagataactaactcgcaacatgttgttcctacatatgcatctataaaaagcactttgaagtatttcaagggctttttataataccttgggtagtctttaacaattatggttagagttgatatgataaactgatcatttccacattttatgagaaaatcagaaaatagaggtgtttttttgtgataataattagaaataataaaaactgaaatattttctaatgtaaaaaaagataaaagaacttattgctgaaaacgattttaacttaacatttgccattgacaagtacttagaggagtgctaaaatttcgttagctggttaacaaaccggttaagtaatgtgaggttcttttatgagtgaattcctttcagccaaacctattggtcataatgattcatctaatactattttaagaattatagagaatacgaaatatattcatcactatgatggaaaagttgttgtcgaaattcctcctcaaaaagagcctatcaaagtcttttttatggattcacgtcttcattatttagaattttcagacatatgtcggtatgtaactgttgttttgaaaaatagtaccgttgataatataaccaatttagggccagataatcatattgtttatgacaatggtgatgatatggttgatccgttgccgagtattcagcatggattatttcttaatgatgattaaagatgtagacaaaaatttagaaacgaggaagccatgacattttataaaaagacggacaaatttggatttaggaaaagtaaagtgtgccgcagcctatgcggtgctttattgggtacagtagcagttgttagtctagctacagcaagtacagagattcacgctgatgaagcaacaacctcacctaccactgtaacgaaagtacctcagccagttcaagcagacacaacagctctaaatacctctaagactcacagtacacaagcaactacaactcctgttgaagctaaggagaataaggttgtcaaaagtgaaactgttcaatctgagagccgagtaatgcctagagataaggtagtagaaaggccagaaacagtaaaagctagtgttaactcagacgttagccaacctattacaaccacacccccaacaattaatgaaaaaacagttgagattcctaacttagctcaagatactaagaaggtagctccaaaagtaactgttacaccagaagttgttaatcagccaaagcagttgcctaaatacgagtaagaaaactcagagaaaggcaataagagtacagaagcaactaaggcagttactgtgactaaaccacagggggcggttgctgagaaagctactccggctgtgccaaagcctcaaaaagtaagagtaattgttgaatttaataaggaatctatcttagattatgcgacagaacagaaaaaaacagttgcacagttaaatcaagctgatgttgagaaaaaattacaaagcatcaagcaagagcaagataaagttcttaagaatattgaaaaaagtgttcactttgattcaagcaaagtgaagcgttacgatgctattattaatggtgtcgcacttgatattcaagctcaagaaattgaaaaattaaaaacgattgctgatgttagaagggtctatgtctcacaagaatatgttcagacaaaacctttactatcttcctcagggcaacttattggtttgccagaagtttggaacaactcccagtataaaggtgagggaactgttgttgcagttattgattcaggggttgatttcaaacaccaagcactaaaaatcaaagaaccaaatcgtgctaagtataataaaactagtattgaaaaactgattcatgaaaagaatctcaaaggaaaattctattccgaaaaagtaccttatggttataactattatgactataatgataacctcaaggatagctacggtgtaatgcatggtatgcatgtaacaggtatcgtaggagctaatgatgataatcaaaaattgtatggtgttgcaccaaatgctcaaattttagcgatgaaggtattttcagatgaccaacaaaatcccacaaccttcacagatgtgtggctaaaagctctagacgatgctattttactaaaagctgatgttgttaatatgagtcttggaacacctgctggatttgtacatgaggggaaagactatcctgaacttgaagttattgcaagagcgtgtaaggcaggaatcgtcattgcagtagcagcaggtaatgaaggaaatatcactgacggtaatacttatggtgttaagccgctagcagaaaattatgatacagccttgattgccaacccagccctcgatgataataccttggctgttgcctctatggagaaccttaaaaagcatgctcatgttttgaaatttaaagataaaaaatctggaacagaagttacagaagtcattaatcttcatgttgccccaaacgcttcaaaaactattattggattggctgtagatttgggagcaggagctccttcggaattgtcaaaacattttgatttaagtggtaaaatcgccatgcttgaaattccagaagataataaatctaatggatttttagaaaaagtacaggcgattactaagttaaatccagctgctatcttgctttacaataatgcgaaggttaaagatgatttaggcagtcaattattagttgaatcagaagcagctaaatttaatattgctcgcattaccagaagcacgtataacaatatcaaaaataatagcaataaaattattactattttaacagagcgtcaagctattgataatagtttagcaggacaattatcttcttattcttcttggggacctacaccagacttacgtctaaaacctgagattacagctccaggtggtcatattttctcaactgtggaggataatcaatatgctgataaatcaggaacatcaatggctgcacctcaggtagctggggcagctgcagttttaaaacaatacattacagataaaaaaattcctgttgataatgctgctgattttattaaattactcttgatgaacactgcacagccaattatcaataaacaatcaaaagatggcaaaacaccttactttgtgcgccaacaaggtagcggagcaatgaatcttgccaaagctcttgttacgacagtcgttgcaactgtaacagggactaacgataataatgcagatggtaagttggagttacgtgaattaaaagagaaaaaatttaaagcacgcattctacttcgtaactttggaaaaactaataaaacgtatatcatctcatcagaagcgattgcggacccagttgatgaaaaaggatttcgtacgcaaaattcagaacacctagtatcaaaaaaagctgatgcagttacaaggaaagttactgtagaagcaggtaagacattagctgttgaccttgatgtggattattctgatgcagaggctttaactcgcaataatttcttggaaggttatcttaacttaaaagatactgaaggtgtagccgatttacacttaccatttttaggtttttacggttcatggacagagcaaaaagctattgatgcttttgaaggcatttctgaaattggtaacggtgacaaaaaacgtcgcgttcaattctatgttaataaagaaaccaacaagacctcatcaacctttacaactaacggcatgttgagtcttccaatctataacaatacagtatttttctctcctaatagtcctttctatgacaaagcaggagttcgtattgcagctttgcgtaatatggagtatgttcaatattctattatagatccagataccaataaagaagttcgtgtacttggtagatcacacgacgttagaaaactttatcgcctagattatcgtaatagttttgccatgatgccagattctatttgggatggtaagattaaagattaaattgcaaaaggggataaacaatacatttatcaaattaaagtacagttgaataataaaggtgtcggtggcgatggtgtccaaatttatcaatactatatcaaaatggacaacaataaaccttacttaagtcccaaagataagactactgtagagaagttagaagatcgctggaaaaaaattactttcaaagttcaggatactggcattggtttgaaagacgtttatcttcaatctgttaagtatgttggtggtggcaataataatttagaccttatcacacctccaggatttaaaaaagaagataaaaaagttgaaaaaccaaaattagaccgtccaccaggaattgatttaccagcaccaacttcaatgagaagttttgattattcaaccccaccgggaactaagccaagcaaacccaaagatagtttatcaactcctccaggtttcccagatttaaacacgccgccggatgaagcaccaaaggatagtaaaaaagacgctattgaagataaatcaggagcaattaaatatgctaagtctcttcaacttagctttgttgatggccctattttagctagcaaagtaaatggcaaaatattacaagtcgaatctgatggcaaattagtcattcctagaaatgctttgtcagctaatcaatttgatgacactagtcttaaaatttatcgtaataataatcgcaataaagaaattactatcacaacagattattttgcagatacaaaatatgtcaatatcacagcggttgactatttgagcaatactacttttgagcaattagctactggtgaaacagtagattaccatgccattgtattttcaagctttgctgctattaaagacaagggtggtaagatttatgttaacgataaattgcaagaaacttctcgtatagcgcttaaagataaatctgttaagattggtattgaattaccaaatgatgtcagacatattgatagtttatctgttcgtcgtttgaatgaggttaaaactgttgataatatcttgaaaaatgatgaacaagacattaatctcagcaaaacttaccaattaaaatacaacccgacaaatcgtcgtctagagtttactattaataacattaactcaagttcagaaatcatgaccactttcaaagatggaaagatgccagaattggttgaacaaaaagatgtttctttggatataaacgatatggacatgagtaagtttaaaactattcgacttggacgaaaggattctgaatttaagggacaacttattgcaaaaactggaacagttgaattagatatgtttttcaaacaatctcaagacccagcttcaattattaaaaaaatataccttatccaaaatggtgttccaaatgaattgaaaaaatttgactctagttttggtttaactgaaagtcagatagatggatactatatttataaagatgcaattaaccttaaatttaaattaaccagtggtgcaagtcttaaagttgtttataaagggcaagaagatccatatagtcatcagaaagaagatatgactaaaaaaggtgaacagctcagtcattcaactcaagccaatgaaaatacagcaaaagtaacctttgctaatattgactggtcacattatagtaaggttactgtgaatggaaaagaagttgttaaaggtagtgagttacctttaactaaaggatggacaacatttgtattacataaaacagaaaattcattaaatgttaaaagtttgattatggagacgggtagtgtaagtaagaaagttcaacaacttcctttaagtcctagattatctaaaaataagcatatgagggatatgctacttactatgcaaaaagattcagcgtattacgaaacaagtgacagtctagtccttcgaattaatctcactgcagatactaaacttaattttaatgctgttaaaggagcgagtgctcttactgaaaatatgatgatgagacagtttgcagttgctggaccacaagatgatcctgttagtgaacataaatacccatcagtatttctcttaactcctgccttattggaaactgctagtgaggcaactctaaatggtaaggaaatcacagcatctggtattatcggtcacatcaaggatggtgataaaagcaagcatgttgaagtcaaaatggtgaatgaaaatggagacatgctaggaacccctgttattattcaaggtaaagacttgactaatcgaacaaaaccattaatgagtggacgtagagtactttatgccggtaaacaatatgagttccgggctaaattaccacttagtcgttttaacacttggattagggttgaagtggtaacagaagcaggagagaaagcaagtattgttcgtcgcatgttctttgaccaatcagttccagagcttaacacagcagttgctaaacgtgatttgacttctgatactgctcttatccacatcgttgccaaagatgactctctaaaactaaaattatatcaagatgattcattacttgaatctgttgataaaaccggtctttatagttttagaaatggtgtagaaatcactaaagatatgacagtaccactagaatttggagataatattattaagttatctgctgttgacttatcaaattatcgtcgtaatgagacccttcatatctatagaaaccgttttgatgttaaagcaagccaaatgacagctgacaaaggagctaaagtaactgtggatatgttgatgaagcacttagttgttccagaaatggcaggagcttatacattaacaatcgacgaagctccaaacacaaatgaatcaggaatgttaacaaacgctaaagtatcgattcattatgtaaatggtggtgttgataaagttgatgttccgattaaagtagttgacttagaagctattcgtaaagctgaagaagcacgtaaagctgaagaagcacgtaaagctgaagaagcacgtaaagctgaagagggacataaaacccaagaagcacctatagttgaagaaggctacaaggttaataacgttcatcaaactgatactacagttaaagcgtctgatttaccaaagactaagacagtttccgcagttcatatggctagaacagacaataaacagataacttcacatcagacacatgttgaaaaacaaattaaaaatacattgccatccactggtgacagcaaacgtggttattatatcactggaatggctatcgttatgctgagtgtattatttagtttagctaaaaagtttaaaagcaaatattaatgataaaataaaatctatttagcaacattaattgtgatggataaaaggttttatctcttaaatcaaaagtagtagctcattagctactacttttttgtataagtgtaaaaaagtgaattcttaacaagaatttaacaccctacttgctatactaaaagtgaataagaaagagaggtgtcatttatgcaaagaaaatcctatttaaaatccatgagtgttcttactttaacagcttgtcttatatcaggatatgtggttaaagatattgctatgttacatgcagtatctgccagtgagaagaaagcaaataatgtcagtccgagagaaaatctctacagggctgtcaatgataattggctagccaatacaaaactcaaacaagggcagactagtgttaatagtttttcagaaattgaggataaattaaagcaactgttagtgtctgatatggctaaaatggcctcaggaaagattgaaacaaccaatgatgaacagaaaaaaatggttgcatactataaacaaggtatggactttaaaacaagagataaaaatggtctcaaacctctaaaaccagttttacaaaaacttgaagcagtctcttcaatgaaagactttcaaagtttggcccatgattttgtgatgagtggttttgttttaccatttggtttgactgtggaaaccaatgctcgagataatagccaaaagcaattggtgcttcgtcaagcacccgcattacttgaatcacctgaccaatataagaagggcaataaagaaggtgaggctaaattatcagcttaccgtacttcagcaatggctttgcttaaacaagctggaaaaagtaacattgaagatagaaaactagttaaacaagctatagcatttgatagactcttatcagaaaaaacgcaagttgatcaaagtaaaatcacagctgaaagtgagacagctgcggggcgatataaccctgaaagtatggaaacggttcacaattacgccaaggaatttgactttaaagaattgattgaaaaactagttgggccaacgaataaggcagtcaatgtagaagataaaacttattttaaacaggttaatgatgttataaatagtaaacaattagccaatatgaaagcatggatgatgatttctatgctagttgatcaatcagattttctaggagaacaaaatcgtcaagcagcgagtgcttttaagaatgttgcgtctggtttgactcagattgaatcgaaagaaaaaatgcttacacccaattagaatatacttttggccatattttgggtgattattatggtaagaaatattttggtgaggcagctaaaaaagacgtcgaacatatggctaagaaaatcattaatgtctataaaacacggttaaaaaacaacacttggttatcagaaaatacaaaagcaatggccattaagaaacttgataacatgagattaatgattggctatccagaagattatcctgatctttatcgtcagtaccaatttgatagtaaagcaagcttctttgaaaacaatgataactacagaaaattatcgaacaagaaaacatttgaagaatttaaccagtctaatcaacgtgaacattggcaaatgagtgccaatgctgtaaatgcttataatgatcctaataccaattccatagtctttccagcagcgatttttcaatcaccactctacgataaaactaaaacagttagtcaaaattatggagctatcggagcaattattggtcatgaaatttcacactcatttgatattaatggtatgaaatatgacgagaaagggaatcttcacgattggtggactaaagaagatttaaaacattataagaaaaaaacacaagctatgattgaccaatgggatggccttaaagcagatggcggtaaagttgatggtaaattaactttagcagaaaatattgcagataatggtggtgttatggcatctctagaagctcttaagactgaaaaaatccaaactataaagaattttttgaatcatgggcaagtatttggcgtcaaaaagcaaccaaagaacaaagtaagtcctcaattcagtcagatgttcatgcaccatatgaattgagagctaacatcccagtacgtaatttccaagaattttatgatgcctttggtgttaaaaaaggcgattcaatgtatctaaaaccagaaaaacgtttgacactttggtaaagctatgttttccagacaataaggagaatgcatgaagaatataacaaagctatcaactgttgctttaagcctactactttgtacggcgtgtgctgcatcaaacacgtctacatctaaaacacagtctcatcatcctaaacaaactaaactcacagataagcaaaaagaagaacccaaaaacaaagaagctgctgatcaagagatgcatccccaaggcgctgttgatttgacaaaatataaggcaaaaccggtcaaagattatggtaaaaaaatcgatgttggtgatggcaagaaaatgaacatttatgaaactggtcagggaaaaattccaattgtttttattcctggtcaagctgagatttcgccacgctatgcttataagaatttaattgagcggttaagtaaaaaatataaaatttatacagtagaaccattaggctatggtctcagtgatattcctactaaaccacgtacgctagaaaacattacaaaagaaattcacacaggcctaaataaaattggagttaaaaatttctaccttgcagctcactcacttggcggtatgtattctttaaattatgctaaaaattatccagaagaagtcagaggatttattggtatggataccagtacaccttggatggaaggggaacaaaaaacaaagtatgaccctgaaagtgctaaatgggcaatgaaattaccagatgttgatgataagactaacgaacagtatctgtcaattgcgaaaaaaattaacggcaataagtctcaacgagatgaagatgagcgcttaggtgataatcttggtaaattgaagaatgtaaaattccctaaagggatgccaactaagtattttcttgctgatcaatctgtggagggaatcaagctacgtcaagcagattttaaaggtttgaaaaattgggatcagcagcatattgatttatctgaagatccaaaagatgcttccgttgaaatttttaaaggtagtcacaatattttccaaacacaatatgaacatatggctaaagctattgatggatttatccaatcccatcaaaagtaatcgttgaatgaaatacctaagtcaaggagaaaaaatgaataaaataacgaaattatcaaccgttgccctcgctttgatgctttgcgttggatgttctgccaataaagataatcaaaaaactaaaactgagcagcctaagcaagaaaagtcaatcgctaagcaaaaacaagagagagaagcagaaaaagctatgattgctaaaggtgctattgacctaactaaatataaagcgaaaccaattgaagattacggacaaaaaattgatgtcggtgacggtaaaaaaatgaacatatatacaatgggtcaagggaaaattccgctagtagtcttccctggtcaagctgaaatttcaccacgttatgcttacaaaaacttgcttgatagattagggaaaaaatataaaatttatacggttgaaccgctcggttatgggcttagtgatatgacagataagccacgtacgattgaaaatattaccaaagagattcatacagctcttgaaaaagtcggtgtcaaaaatttctatcttatggctcactcgttaggtggcatatacggtctaaattatgctaagacatattctaacgatgtcaaaggtttcattggcatggatacaagcacaccaaatatggaaggtgatggcacaactggagaatcttcagcttcaaccttaaaatgggcagaatccattccagaagttgataagaaaaccaatgaacaatacttatcaatcggtgctaaaaaatcaggtaataaaacagagcgcgataaagataggcgtgttagtgacaatcttcataaaatggaaaaagttaagttccctaaaggtatgccagctaagtatttcttagctaatgagtcagcagaagatataaaaatgcgtaaaaaaatattccctaagcttaaaagctgggaacaacaacatattgacttatctgaagatccaaaagacgtttctgttgagacactagatgctagccacttgatttatcatacgcaatataaacatatggcgaaggctattgacgagtggattcaatcgcatgaaaaataattattccccccaattattttactaaggagaaaagatgaataaaataacgacattatcaaccatcgccctgactttaatgctttgcgttggatgttctgccaataaagataatcaaaaaactaaaactgaggatcctaagcaagaaaacgtaactgcaaatccgaaggaagacaaggcaacagcagccaagcgaatgaagttaacgaaagaacttgaaaaatataataaaggcacagagagctttattagtaacaaacaatatcaaaaatatatcaaaacacctatcaaagaatatggtcaaaaggttgaagtcaaaggcaagaagatgaatgtctatactgttggagaaggtaaagtaccaattgtctttattcctggtcaagggacggtgactgccaaacatcagtaccataatttgattagtaatttaagtaaaactcataaggttgtggtagttgagccatttggttcaggtttaagtgatgtcattgaccaaccacgaaatctagctaatattacctcagatatccacgaagctttacaaaaagttggtattaccggaaaatatgtaattgcctctcattcaattggtggtgtttatgcccttaaatacatcagtacttatccaaaggaagtgctaggattaataggtttagatacatcaacgccgggtatggaaggtggtaagcaagttgatttcgctgctccagtgttaaaagaattacctaaaattcctaaagtatccgacgatattaatgcacaattttttgctattggacataagatacttaataattctaatatgaaagaagaagcgaagaattcttctaatatgattaacgaaagtgccaactataagattccaaagggaattcctgctatgtatttattagcacgtgaaagtgacttagggcttcaattacgtagtttagatataccaattaaaggcagttggcaagagcaacataaggagttatcagaagatccaaaagaagtctctattcatacactagacggaactcaccaaatttatgatactaaccttaaagaagtaattgattatactaaccaatttatgaaaacatttgagaaataattgtttttagaaacagtgctataaaatcactaattgatagataacgtagaagtcgatagagaatatctaacgacttctatcgttattctagagattattaagatagaaaaaggagggaaaatagtgaacctatggacattaagtttagcttatttgaaacgtcaaaaaatgaaaacagtaaccttgttcttagtttttctaactataggcacatgtttaatcagtctgatgagtattcagcattctttggaaaaaaatatcctaacaaaacaagggaaaagcatttatttaacctccaaagaaaaggcttattggcctgaacaagcatacgaagctttgaaaaaagcaaaaatggttgagtcagtagaggcaagtttaagcattgatgttggtagccgtttaaaatctgtatcaccatataactcttctaaagaagagaatcaagttacattagcaggttatcaaagtacagaagatttacgagcttttcagacaaaagcattggtcttaaagaaaggaagccatttagcggccgataatacaaaacaagtactagttccattgaagttagcacaaaagaatcatttaagtgtgggtaacaaattgagattaggcaaagaaaatgttactattgcaggaatttatgatgcgaatagtgctaagtctaaaaatacttttaatcccaatattgataatacattgattgctcaggcaacattggttaggaagattagtaaacaaaaaggttatcagacggttgcagtgcgcttaagtgataaacgtttagtggatacagttatccaaaacatcaaacaatggccgcttgatttcgggaaattagatgttcaaacagctaaagagttttatggagattcttatcgtaatatcgagacattgcatcgtctagtgggacgaatcattcttattgttagtctcgtggcgatggcaatattagttgtcatgctaacattttggattaataaccgcattaaagagacgggaattttactcgctatcggaaaaactaagtttgaaatcataggtcattatctgatagaagtactgttagtagcaggtgctgccttcacactatctattattggtggtgtctttcttggaaaaacatttgcagctggccttttatcacaagttaatggtggtgtgagttcacaaattgtacaaaatagtagtctaattattgatagaattgataacctcgctgtttctgttggagtaatggatgtctttagactctatgctcagggtgctttaatttgcttatttgcagttgtattatctagttattctattcttaaactacaaccaaagcaaatattgtcacgaatgtcataggaggttaatatgaatttatttaaacgttcctttttatatgttagccgtaaaaagcgtaagagtatcactttattcgtatgtttatggctagttgcttctacattaattagcggtattgcggtaaaaaatgctggtcttactgctaagaagacattttcaaggcaaactggatcaattttgcatatttcatcggatagtactgaccttgttggtgatggttacggatctggagaaatccctgaaaaagcaatagttaacatagcaagtaatccaaatgttaagcgcgttaataataatttgatggcttatgctggactaacctcggaaaaaatggttacacgaccaaatgataaagaacaatataaagaacaagttttacaagttcatggtaatagttactccgatacagatcctaaatacacagcggggatgatttctcttaagggagggtgacatatcacgccgaaagatcagcgagttataattgttcatcaggcttttgcgaagacaaatcatcttaaagttggcgataagttaatgttttcaaaagaccccgttagaaacagtaaggataaaacattagttgaagcaactattgttggcatatataaaggtaaaacggtacaaaaatcaaattacccttatgagatgctagaaaatacagccttttcagatacgcaattgattaaggatttatacggctattctaaaggtaaggccttttatcgccaaacaactgtatatcctaaaaagaatgctgatatagaaactcttaaaagttttatcaaaaaacaatcctattgattggaataaataccaactgacaattacagcaaccttgctaacaagttatgcaaaaagtatagatgtcttgaatcaattaattacttctctacaaggcggcatgttagtagtatctattatcctagtgatgatggctctgctattctggattggtggtagaacccatgagacaggtattttattagctattggtaagtctaaagcaattatcattgtcagtacgcagtagaagtactaatgattgctattccagcctttgctttatcagtacttatcagtcaatttattggtcaaaaattagcagactccttagtgtatcaggcctctagaactgtcagagcagactttatgaaagggtttgggaatatgcagcttggggctgatagtgatacagatatgtttatgcaaacgattaagacgttaaatgtacaagtgaagcctgaggaagtctggttagtaattctagttggtttagcaatcgtcttatttgctattattactactagtttaattattgctcgctacaaaccaaggggaatcttatcaaaactgtcctaaagtgccataagtataccgaccaatagtgacatctatattaacggttaaaatgaatatgctctgctattgaatacatagctcaagaaagagaaatctatgctcgaattaaaaaatattgcttatcgttataaggggaacgacaataaaacattagaaaatatcaattatagttttcagtcaggggtattttatactatattagggaattctggttcagggaaaacaacccttctatccttgatggcaggtcttgattcgcctactgagggacaagtattatttaacaaaaaagatattaaagaagcaggttatgctcagcatcgcaaaaagaatatagctttggtctttcaaaattataaccttttagactatctaaccccattggaaaatgttcagttggtaaaacctactgcagataaacaattattgttggatttaggtttaaaagaagatatgttaacgcgaaatatcttgagattatcaggagggcaacaacaacgtgtagctattgcgagagctttggttgtaggaacaccagctattttacttgatgaacctacggggaatttagattttgacatttcgcgtgatattacgatgcgtcttaaagattttgcgcataaggaaaaacgatgtgttattatggtgacacatagtagagagatcgctcatatggctgatactgctttacaattgataggagataacttaaaagaattatcaaaagaaagtatagcacagtctatattacaacaaaggaatttataataaaaaaatacctccctttcttaaataataaaagaggaggtattttttagaaatggttatttattatcagaaaaggctcgctctgccatttgttgaattttaattgtagagttattctgataaacgacaccattaaccagtgcaccatgcgcatataaacctggcattggaccatattttggagacaaaacttgtgcattttcagttaaaatagtaatccctccttgatcgtcaatttgacaaaattcttgattgatgagcgattttagaagtggattggcttttgtccagtttttagtgtttaactggtaaccagtagcgttaatgacgcgatcgacagatatatgattttgtttttctttttctattgaaaatccttcgtcattttttgtaattgtcttgacgttattgatcagagaaaaagtccctttttgtgcagctttcaaaattactttagcagattcatcaggcataggatttcgcaagttaataatcgcttttccatagagtgctttatactctttcttatctgataatgacatgagtggccaaaggtcagttaaccagacagtgattcgtgaagctaattgttgtaatagatagagttgcttagggtatttaaaggctaacttgagaccatcaattcctggggataaaaaagtttctgttgtatttttccagtttttaaagccaagatgctccaattcgccagacatcaaatcattaaaatcggcaatagtgaaggtttttgaaggatgtgatagaaatgctttaaggttatcattggtaaaaaagtgccaagtaagtggtaaatcattaacaatacggacgctagggaagtagttggttcttgaaaatgctttaacagaagattgtgtattgagtagcaaccattttataacatcaattgcagctagaccagtcccgatgatagcaactgtttttcccttccaattttcctgagccaagtatttgataggataagggtctttgatataatcggtcttcccttccaaatgataaggttctataacaggcagagcaccacaagctaagtgtaattcatcaaatgtgacaggaaaaagcttatcttgaatatagacttgccattgttgctcatctgataaatagtttagtttatccactcttgttttaataaccgtgacagggagtttatctaaaagtaacttagttctttctgaaaggtattgtccgtaaagtgtccttgatacataggttagatttgtgtcatagtaattttcttctaaccaatccatgaagtcagacatatggcgataatcaaatgaaatatcgttgattggggaattgattaaagctgagtcaacgtcttcttgaaaaggaattcctcgtccaaagtggacagtatcatcaaaacaaaaaatagctaactgttttaactctttctcttttttacgagaaagtgctagtagaacagctaaaccactaactcccatacctataataccaattgtttttttcacagaacaagcctccttaccactatcatagcataaattttgatttaagttaggggatgaacaaagctattatttgcagattttctaatttaatgagtaaattaaatttaaagtaatattaaattaatataagattaaataaatgattgacatgcttaaataataggcatatgatatggttgtgacaaaaggagagcaattagctaaaacggatatcaatatggtagacgcttgtttaatgtaattagaaagaggtaaagcttatgaaaagattacataaactgtttataaccgtaattgctacattaggtatgttgggggtaatgacctttggtcttccaacgcagccgcaaaacgtaacgccgatagtacatgctgatgtcaattcatctgttgatacgagccaggaatttcaaaataatttaaaaaatgctattggtaacctaccatttcaatatgttaatggtatttatgaattaaataataatcagacaaatttaaatgctgatgtcaatgttaaagcgtatgttcaaaatacaattgacaatcaacaaagactatcaactgctaatgcaatgcttgatagaaccattcgtcaatatcaaaatcgcagagataccactcttcccgatgcaaattggaaaccattaggttggcatcaagtagctactaatgaccattatggacatgcagtcgacaaggggcatttaattgcctatgctttagctggaaatttcaaaggttgggatgcttccgtgtcaaatcctcaaaatgttgtcacacaaacagctcattccaaccaatcaaatcaaaaaatcaatcgtggacaaaattattatgaaagcttagttcgtaaggcggttgaccaaaacaaacgtgttcgttaccgtgtaactccattgtaccgtaatgatactgatttagttccatttgcaatgcacctagaagctaaatcacaagatggcacattagaatttaatgttgctattccaaacacacaagcatcatacactatggattatgcaacaggagaaataacactaaattaataaaagagcaactaattgctctttttttgttgtcattcttagtgattaatagtgttaaatagaaatttttggatacattacttagtgttccgatatgatttgacaccagaaataaggacaggaattaaggtaacaaatacaattcccaagataataagcgagaagtgctgcttcacaaaaggaatattaccaaagagaaaaccagaacctgttgcaataactgaccaagataatgctgcaatgaaggcgcgtttgataaatacttttggagggagctgactaatacctgctacaaaaggaacaaaggttctgataatagggatatagcgccctaaaatgatggcagcagtaccttttttctcaaaataaagctcagcatctcggatatttttttctttaatgaaacgacgaaagaaaggatgtttgataaaacggtaaccaaatgtacgaccaatcaagaagttgcaactatcaccaataaatgctgcaataaagaaaataataagaaaagttacaatattgaaggacatttttggatttgcagcaagggctccagcagcaaataataaactatcacctggtaaaaatggaaagatgacagccccagtttcaacgaaaataacgaggaagagcaatagataggtccaattaccaacagtgttagccatagcatagatatgagtatcaatatgtaaaataaaatcgattaaaaacataggagtctcctttattgatcaactaaagtgcagagacttggatgataactatcttgtttataaggcctcttacaaagcctattttatcagaaaatttttaataagaggtaaaataagtttacttattaatttagaattattctaaagagcttttttttgatttttatgttagacttaattataatgattataaataagaaataaaggagcttaacaatgtcctatttaacctttaaacacgttgattttaaaacggatgataagttggttttaaatgatatcaactttgcaattgatgaaggtgattttgtttctattgtagggccatctggaagtggtaagagtactgtattaaaattagccagtggtttaatgagtcctactgcaggtcatattttctttgatggaaaagatttgaaccaattagaaccgattgaaagtcgaaaaatgatttcttactgttttcaaacgccacatttatttggtaatacagtggaagacaatattagttttccttaccacattcgacacgaaaaagtagattatagacgcgttgatgatttatttcaacgttttgaaatggaccagtcttacctgaaacaggatgtcaaaaaactatcaggaggagaaaagcaacgtattgctctgattaggcaattattgtttgaacctaaagttttactcttagatgaagttacttcggctttagacaatcataataaagctattgttgaaaaggttattaaatcattacatgacaaaggaataacgattttgtggattacgcatgatgaggaacagagtcgtcgatttgccaataaagtcttaaaagttgtcaatggtagtattgaagcaatggaggttataaaatgagcggtgaaaattctatttctttaatgtcattactaatggcatcgtcattagttttgattactttatttttttcttactggcaaaagttaaacctagaaaaagaagtgattattagcgctatccgagcagtgattcaattattagcagtgggttttttgctagactatatatttggttatcaaaatcctattttcacagctcttttaatgctattcatgattattaatgcttcttataacgcagctaagcgtggtaaagggattaataaagggtttgttatttcatttatagctattgggtcagggactataatcactttatctgtcttgattttttcaggaattttaaaatttgttccgaatcaaatgattcctgtaggtggtatgattattagtaattctatggtagcaatcggtttgtgctataaacaattattgtccgaatttagaagtaaacaagaggaagtggagacaaaattagctttaggagcagatattttgccagcttcgattgatattattcgtgatgttatcaaaactggtatggtacctacaattgattcagctaaaacacttgggattgtatctttgccagggatgatgacagggttaattcttgctggaacttcacctatccaagcggttaaataccaaatgatggtgacgtttatgctattagcaacgacttcgatagcttcttttgtagctacttatttggcttataaaattttctttaataatcgtaagcaattagtagtaacaaaagattgattcattttaataaacagtatgttagtctggtaagtatagtccaggcttttttggtatcttaatcttatttttgatcgaaaattgaccaagttattgagtcgattacgtttaaatgctactatttaatagaaattgttgtagggattatcaaaaggaggaagaaatgattttaaaaatttgtcgtgcagcatatagtttacaatggggaggtgtttaccaattagctttgctggattatcctcgaattaaggcgtttgaattggaaaggataggagctttcatagcttacgagaaacaatataaaagaaaaactgagatacaatgtgacgataaacatctcctcgcaaaaattgttcattttttaaaatacaatagttttacttttccctatattcccaaatatagagaagcggcagctacttttaatgaggatggtattagtttaacttctgattttttaagccatacatgtacgattgaaactgcaaaactaatttttaaagaaggtaaaatcttatcagcagttaaagcctttaataagcctgctgaagtactggtaaaagataagaggaatgctgctggagaccctaaagattactttgactatgtgatgttgaactggtcaaataccaattctggttatcgtttagtaatggaaagattgttaggcaaagcaccatctgaacaggagttaacagtaggttttaagccaggggtcagttttcattttacttatcaagatatcatcaatcatcctgattctatttttgatggttatcatcctgctaaaattaaaaatcagctttctttagcagaacatttagttgcatgtgttatcccaaaacattatcaagaagattatcaaagccttgtgcccaatgacttgaaacacagggtttattatttagattactgtaacgaaacactttatgagtggaatcaaaaagtttatgattttctttgtcatttggaaaataaataaaaccaaaaagtttaaaactttttggtttaactgctattaattggtctttaaaagacttaaaaattcttcaatcataggactaaaagaagtatcatttcggtaagcaataccaatcggataaaaattatttttatccttaagtgggacccagcataaatcttgaacttggctaatgctttcaaattcacttggtaaaatagtgactgcattgaggtcttgtaaactatgaataagaacttcccagtcattgtgtttaaagacgatatgggggtcaaatcctaaagcacgacatttacgaggcaacatctctcctagcatataatgttcgttgagtgaggcaactttataatctcttaaatcattaagttcaatttcaggaagtgttgcaagaggatgcgattttggcatgacaatgcttactttatatcctttagttgaggtttgcagtggttcgatagtgatatcattgcgggtacttggaaaggacaataagccaatatcgatctttccttttgctaacaattcttgtaatttacgggaaccatcttgaatcaaagatacttcaacatttgaatgtgtagccataaaagttgaaatctgtttcataaattgaatagcaaaaagagaagtaagccctacacggataccttcctttttttcttgatttaattgctggatctccgtaaccatttgattaacattagtcatcaacaattgtcctttctcatagagaatttctcctgcttcagttaaagcgagttgacgaccattttgtaagaataaaatagtatttaattctgcttctaattttttaatggattgtgaaagtgtaggttgggtcacaaaaagactttttgcagcgcgtgaataattttttgcttctgcaacagcaataaagtaagtaagttgtctaatatccataatatctgtccttttttcttagtaatagtatagcacaagtctatcaatctgacctttatgattatttccacaataatattagtaaaagctatacttatataattttttccaattttccttttgcaaatagctatgatatagttaatatagttagtgaaatcacaaacaatcattattagtaggaggcatcttatgtcggatgttgtcgaaaaacaaacaactaaatcgtttataatgaacgtattaaatggtttagctttagggactgttattgtcttgataccaggagcaatccttggagaattaatgaaagctttactgccaatgtggagcggctttgcaactttaatcgctgcaacagcagttgcaacaagtatgatggggcttgttattggtattatggttggtctcaattttaaatttaatcccattcaatcagcatcactaggattagcggttatgtttgcaggtggagctgcaaccttccttaaaggcgctattatgctaaaaggaacaggcgatatcattaacatgggaattactgctgccttaggtgtccttttgatccaatttttatctgacaagacgaaatcattcactttgattgtcattccaacagtaacactcttactagttggaggagtaggtcatgtgttattaccttatgtcaaaatgattaccaccatgattggacaagggacacgccgtacgcatgaaaactttctcttcatccttttgtgcccggacatcaattttgaaaagattcctttttaaatcaatgatctgcttagcctctttctccaaataattggactaaataatcttccaaatggacagaaatataccgttgtttgcgacgataactgaggtcttttttaggaaataccatcactttgagaaaatataagcacatttttcggataagatttaggttaaatgcggctcttttatccaatgtctgatgatgatcttcatgataaacaacgtccaataaccagtgcatactctctatctgccaatgacctcgtacacaattggcaaatgtgaggacatccggcttaaagctaaagataaaataacgattctcttgactcagctgaccatccttatcaatcgtgttacgagtcatcccaataccacgtaacttatgccatttgggatggttttgacacaaccatttgatatcggaagacacccagtattctctaacttcaatctgtcccctagatttttcaacagtctgataatactgcgcattttcttggagttcttccaataagttgacatcactaaaataaagagcaatatcatcataaagtgtttcttgatttcctttgacggctaagcaatagtctgctttaccttttataatcgtatcaacgatagccgtctgcgtgcccattgcgtctatcgttacaatgcttttacggatatcaattgtccgcaataactgaggaatggcaacaatttcattacttttctcctcaaccgctacctgtcccaaactaagatgatgacccccatcataagccgttacaatatgaacaggcttctgatttttacctcgattgcctcgaatcgttttaccgtccactgaaatcagttgatgaacggcatctaagcttgtcaatgattgctcaaattgaactttaagctcttttaaacggtctgaattaacaagactaatcacacgctctaaggtatcatgagacggacaaccttcactcaaatcaacgtaggtcgcaaacaatggttcattcatttcaataaaatcttccatctccttccaggtttcaatgccagctaactgacaaacaaagacaagaaatagaatggttgataaggggtagcgaattttccaagattgacgactatccaattcaactgcgcaatcatcaatagaaataataaaatcaatcatcgtagtcacctcatctatagtgtactactttgattgattttgtcattatgaatctagttttctgaaaacaaaagtttcttcatgcgtttggcgtggacaagggattgcttcattacttggtttacaacctgttttgatgtcaattttaattgcgatgattttctgtttcttgatcgtatctccaatcacaacagttgggattgctttggcaattagtttgtccggaattggttctggtgctgctaatttaggtatctgtgctgctagttttgggctttgtatggctgggtggtcagtcaattctaaggggacagccttagcgcatgttttagggtctcctaagatttcgatggctaatgtattagcaaaaccgaagattatgctacctatgatatcttcagcagcaatactaggaattctcggagctctctttaatattcaaggaacaccagctagtgcaggttttggtatcagtggtttgattggaccgattaatgctcttaatttagcaaaaggtggatggtcagttatgaatatgttattgataattataatatttgttgctgcaccaattatattgaattttatttttaattacctctttataaaagtacttaaaattattgatccaatggactataaattagatatttaaggagatattagtgatgaaactcaaagtatttaatgttagagaagaagaagcaacattagcacaagattgggcaaaccgaaatcatgtggaactttctatgagtgaaggacctttgacattggaaactgttaatgaggtagaaggttttgatgggattgctaatgcacagattgagcctttagatgatgctatttatcctcttctcaaagaaatgggaattaagcaaatcgctcagcgcagtgctggtgttgatatgtataatcttgagttagctaagcaacatggtattatcattagcaatgtgccaagttactcaccggagtctattgcagaatttacagtgacaatcgctcttaaccttattcgaaaagttgagcttattagagctaatgttcgtgaacagaatttttcatggaccttgccaattcgaggacgagtcctaggtaacatgactgtggctataataggaactggtcgcattggtctagcgactgctaaaatttttaaagggttcggatgtcgtgttattggttatgatatttaccataatccaatggcagatggtatccttgagtatgtcaattcggtagaagaagctgttgaagaagctgatcttgtgtccttacatatgccaccaactgctgaaaatacgcatctatttaatttagatatgtttaaacagtttaaaaaaggtgctattttaatgaatatggcacgtggagcattggtggaaaccaaagatcttcttgaggctttagatcaagggcttttggagggagctggtattgatacttatgaatttgaggggccatatatacctaaaaattgtcaaggtcaagacatttcagacaaggatttcctaagactgattaaccatccgaaagtaatatacactcctcatgcggcttattatacagatgaagcggtcaaaaatctagtagagggtgccttaaatgcttgtgtagaagtgattgaaacgggaacaactactacgaaagtcaactaaaagatgcttaggcatctttttttgtggggtaacaaaacatatgatgatcatgacctttaaagcaaaaaaacatcttatgtatttatagctggaaagtcttttttataataaaaaaagatattttttataaaaatattgaaaaaacatcagatgaatagtattatttaatcataaaagcgtttacaaaatacaaggagggttctctcatggagaaaacaatggatatggaacaacgtgaagaagttgtatcttataaccgagcgaaagtatggcagttagttatgtttgccatgaacaatgcttctacaaatatatacttatttacgtttatgtttgttacctatttctcaactggcgttcttggctcggcagccatttttgtcagtcaaattatgggttatatccgtatttttgatggttttattgatccagctattggtattatgattgataaaactgatacaaaatttggtaagtatcgtcctattttgattattgggaacgttattacggctttgtcattgatttttcttcttgcattgagaggtgtcgatgaaaatattcgtttcccattatttatccttgttctaattatccataaaattggatactcaatgcaacagacaataactaaagcagggcaaacagcactgacaaatgaccctaagcaacgtcctatttttaatatcgttgatgcagttatgacaacatcattaatgacaggcggtcagtttgtcgtttcagttttcttagtaccaaaatttggtaattttacacctcaattcttcaatgtccttatttttggaacaattcttatttcagctattttagcaatcgttgcaattattgggatttgggcaaaagacagaaaagaattctttggtttaggagagaatacccaaaagactgctctaaaagattactggaaggtgttgaaaggaaataaaccgcttcagatattatccattgctgcagctttggtaaaatttgccatccaattctttggcgattccgttgttatggtgctattgtttggtattttatttggtaattatgctttatcaggacaattctcacttcttttcattgttcctggtgttattattaatattttgttctcaacaattgctcgtaaaaaaggtcttcgtttttcatatgtcagagcaattcagatcggtatgattggtttacttgcttttggtgcagttctttacgttggtaagcctggtgaccttagtttaacaagcctaaatctttatactattttatttatcgttactaatattattgcgagatacgcttcacaagcacctgctagtttagtattgactatgggagcagatatttctgactatgaaacttctgaatccggtcgttatgtatcaggaatgattggaactatcttctccttaacagattcgattgcttcttcatttgctcctatggtagtaggttttgtgttagcaggaattggattttcaaaatcatttccaactatcgaaacaccactgccccctgatttaaaaatggcagctattagtatccttgtggccattccatttatagctttgtctatagctcttcttttaatgaaattttacaaactagataaagaagaaatggttcgtattcaagagaagattcaagttatgaaagcagcaactactaaggaacgtgctaaagatattgctcgtaatgttcctttgacagatatggattatgttgatgtaacaaaatatcctattgataaagattaaaaagtttagctgctcttcaatagagcagctattttgttaaataagagctaccattggaggattcttatggcaaaaattatttcattaggtgaggttcttttgcgattatctccacctcaatatcacacactgatgcaggctaatcacctaaaatgccaattcggtggttcagaacttaatgtcttagcaagccttgctcaactaggttaccatgtaggattggtctcagctttgcctgataatgatttgggcaagatggcaagtcaatttatattgtcacagcaaattagtccagctgctataattaaaaaagaaggacgactaggaatttattactatgaacaaggattttcggtaagaacaaataaggttatctacgatcgtaactattcatctttttgggaaagtaccttgagtgattatgattttacttctatttttaagggagtggattggtttcatgtttctggaattactccagcactaaccaaggacttatatgaggtgactcggttccttatgacaaaagctaaagaaggaggtgtaaaagtatcgattgatctcaattttcgtgagagtttatggtcatcttttcaagaggcacgtgagcaattatcgccactattaggattattagatgtttgctttggcttagagccgatttatttagctggcgaaagtgaagatttaaaagatgagttgggcttatccagaccttaccttgatattgaattacttgaaaagataacccaaaagattgtccaagaatatgggttagactatattgcctttactcaaagggaaatggaatatactaatcagtatatgttaaaatcatatttgtatcataataatatgttatatcaaactgataaaactggcgttgaagtattagatcgtgtggggacaggagatgcctttgctgcaggtttaattcatgcgcttctggaaaaagaaactcctcaaagggccttagaaatagctatggctacatttaaatacaaacataccattcaaggagatatcaatatcatgacacgagatgatattgcttacctcattgaaaaagaaacaaatgatattaaacgatagtgtaaaaggagagtgtatgttatatccattattgacaaaaacaagaaatacttatgatttaggcggtatttggaactttaaattaggagaacataatccaaatgaattactaccttcagatgaagtcatggttatcccgacttcatttaatgatttgatggtaagtaaagaaaaacgtgattatataggtgatttttggtatgaaaaagtcattgaagtacctaaagtatcagaggatgaagagatggtgctgcgttttggctcagtgacacatcaagctaaaatttatgttgacggtgtattggtaggagagcataagggaggttttactccttttgaagttcttgttcctgaatgtaagtataataatgagaaaattaaggtatcaatttgtgctaataacgttttagactataccacgcttccggtcggaaattatagtgaaatcattcaagaagatggtagcattaagaagaaagtacgtgagaattttgatttcttcaattatgcaggtgtgcatcgtcctcttaagttgatgatacgtcctaaaaatcatatttttgatattacaattacaagtcgtctatcagatgatttacagtcagcagatttacattttttagtggagactaatcaaaaggttgacgaagttagaattagcgtttttgatgaagataacaaactagtgggtgaaacgaaggatagcagattatttcttagtgatgtccatctttgggaagttttaaatgcctatctgtacacagcgcgtgttgaaatttttgttgataatcaactccaagatgtctatgaggaaaattttggtcttagagaaatagaagtgacaaatggtcaattcctattgaatcgcaaacctatttattttaaaggatttggtaaacatgaagatacgttcattaatggcagaggtttgaatgaagctgctaacttaatggatttgaatcttttgaaggatatgggggcaaactcttttagaacatcccattatccttattctgaagaaatgatgcgtttagcagatcgaatgggagtgttagtgatagatgaggttccagcagtagggttatttcaaaattttaacgcttccttagatttgtcaccaaaagataatggtacgtggaatttgatgcaaacaaaagcggcgcatgaacaagctatccaagaattagtgaagcgtgataaaaatcatcctagcgtcgtgatgtgggtagtcgctaacgaaccggctagtcatgaagcgggagcacatgattattttgagccattagtaaaactttataaagatttagaccctcaaaaacgtcctgtcaccttggttaatattttaatggcaaccccagatagagaccaagtgatggacctggttgatgttgtctgccttaatcgttactatggttggtacgttgaccacggtgatttaacaaatgcagaagtaggtataagaaaagagttattagaatggcaagataaatttcctgacaaaccaattatcataacggagtatggcgctgatacgttaccgggattacattctacttggaatattccatatacagaagaatttcaatgtgatttttatgaaatgagtcatcgtgtttttgatggtattcctaatttagttggtgagcaagtctggaattttgcagactttgaaactaatctgatgatacttcgtgtacaggggaatcacaaaggtctcttttcaaggaatcgccagccgaaacaagtcgtcaaagaatttaaaaaacgctggatgactattcctcattaccataataaaaaaaatagtgtaaaataggggtagttattttagaagaggtgatgatatggctagacccttagtagaacaaacagcagatcgtctattgcatttaattttagaaagagaataccctgttggtgctaagctccccaatgaatatgaattagcagaagatctagatgttggtcgcagcacaatccgagaagcagtcagaagtttagcaacgcgtaatattttagaagtcagacagggctctggaacatatattagttctaaaaagggtgtttctgaggatccattagggttctctctaataaaggacacagataggttgacatcagatctctttgaactacgccttttattggaacctcgaatagcagagctggtagcttatagaattacagatgatcagttacaattactcgaaaagcttgttggagatattgaagatgctgttcacgcaggcgatccgaaacatttacttttagacgtggaatttcattccatgctagctaaatacagtggtaatattgcaatggatagccttttgccagtcatcaaccagtcaattcatctgataaatgcgaattatacaaatcgtcagatgaagtcggatagtttagaagcacatagagaaattatcaaagcaatccgagaaaaaaatccagtagctgcacatgatgctatgcttatgcatatcatgagtgttagacgttcagcattgaaagcttaatataagaagaaaaatagctattcttgaatagctatttttttagtattcttcttgacaattcatcagatgacttatataatatagttaaagataacggttacattttgggaggtattatgttaaatcaattgaaaaacaactatttctttgctgttattcgagggaaatcatctgaggatgcgctcgaaatcgcaaagcatgctattttgggtggtattcggaatattgaagtaactttttcgactcctgaagcaagcaaagtcatcaaacaattatcagatgactttaaaaataataaagaaattattgtgggggccggaacggtcatgacaactgaacttgctaaagaggctattgatgctggagctaaatttttggttagcccacactttgattcagatattgctaatttagctaatgaaaacaaggtttattatttcccaggctgtgcaacggcaacagaaatcgtggtagctagaaagtataaatgtcagattataaagctttttccaggtggagttgtgggtccaggttttatcaaagatattcatggtcctattccagatgttgatttaatgccatcaggtggcgtctctgtttcaaatgtagttgaatggagaaaagcaggagcagttgcggttggtgttggctcagcattatctagtaaagtagccacagaaggctatgatagtgttactaaaatagctaaacagtttgtttctgcacttgattagtgagtaagagaagaatatggcgtttaatactgaaacatttatgttaaaaaatcaagcagctatacagctgtatgaagaggtcaagagacaacctatttttgattatcattgccacttagatccaaaggacatttttgaagatcatatttttgataatattgtggatttgtggcttggtggtgaccactataaatggcgtcttatgagggctaatggtatttctgaagcagaaattacaggtccagcatccaaccttgagaaatttaaagcatttgctagaacactagaaagagcatacggtaatcctgtttatcattggtctgctatggaattgaaaaatgtctttggtgttaatgagattttgacagaatcaaatgctgaggaaatttatcatcgtttaaatcatttcttgaaagagcataaaataagtcctagacgtttaattgcagatagcaaagttatgtttattggtactacagaccaccctcttgatactctcgagtggcataaaaagttggctgctgatgagagttttaaaacagttgttgctccgacatttaggccagatgaagcttttattgaacatcgacattttgttgattttattactaaactgggtgacattactcaaaaagagattacagatttttcaacatttatagcagcaatggaagaacgcattgcgtattttgctcaaaatggttgtagggctagcgatatcagttttacggaaatcgtctttgaacaaactgatgaattggagttgaacgatttatttaataaagtttgtgaaggctatatcccaaatcaatcagaaatcagcaaatggcaaacagctgtttttatggaactttgccgattatataaaaaatatggttttgtaacacaggtgcattttggagctttgagaaataatcattctactatttttgaaaaattgggagctgacgtgggtgtggattcacttggtgaccaagtggctttaactgttaatatgaaccgtttattggattccttggttaaaaaagatagtctgcctaaaatgatttggtataatctcaatccagcttacaatatagcagtagctaacactttggcaaattttcaagctaacgaacttggagtgagatcttaccttcaatttggtgcaggttggtggtttgcagatactaaattagggatgattagtcaaatgaatgccttagcagagcaaggcatgttggcgaattttattggtatgttaacagattctagaagttttctatcttatcaacgtcatgactattttcgacgtattttatgtacctacttaggagaatggattgaagaaggagaagttccagaagattatcaagctttaggaagtatggctaaagacatcgcttatcaaaatgcagttaattattttaagaactaaaaaggaagagtgaaatcatggaaatgtcatttaggtggtatggtgaagacgaccccgttactttagaaaatattggtcaaattccaacaatgaaagggattgttacagcgatatacgatgtaccagtaggagaagtttggtcacgtgagcgcattcaacagctgaaagaaaaggtagaggcagcagggcttaaaatttcggttatcgaatcagtacctgttcatgaagatatcaaattgggacgtccaacacgtgatctcttgattgataattatattcaaaccgtcaaaaatttggctgcggaaggtattgatactatttgttataattttatgccagtatttgactggacacgcactgatttagcatatcaatatccagatggttccacagctttgatatttgatgagacggtttctaaaaaaatggatccagtaaacggtgaattatctttgccaggatgggatgccagctatagtaaagaagaaatgaaggctatcatggatgcctatgctgaaattgatgaggaaaaactttgggaaaatctcacttattttattaaacgtattattcctgaagcggaagccgtaggcgttaaaatggccattcatccggatgacccaccatattctatttttggtttacctcgcattattactgggttagaggctattgagcgttttgtgaaattgtacgatagtaaaagtaatggcatcactttatgtgtgggttcttacgcttctgatccccagaatgatgttttagagatttcgcgacgtgcttttgagttagatcgtgtaaactttgttcatgctcgcaatattaaattaggtgatggaaagtcatttaaagaatcggctcatccatcagaatacgggtcaatagacatgtatgaagttattaagttatgccatgaatttgggtttgagggtgctattcgacctgaccacgggcgtatgatttggggagaaacaggtcgtccaggatatggcctatacgatagagctttaggagccacttacgtttctggtttatacgaagctgtgattaaaggttcaaaataaggcgatgcttccaaatttctcctgttccaatctcctgaaagagaaatttggaaagttattatcataatatgattgtacttagctaagagtagaatacttatagaagttaatgagaggaataagatgtcaaaaacaattacatttaccaataaagttgtcgtcataacaggtgcaggcggtgttctctgtggttatatggctaaagaatttgcgaaagcaggcgctaaagtggcattattagatttgaatcaagaagctgctcaaacatttgctgatgaaattgtagaagaaggtggtatcgctaaggcttataaagctaacgttttgtctaaagaaaaccttgaagaagtgcatcaagccgttttagaggatcttggaccaactgatattttagttaatggtgcaggaggcaacaatcctaaagctacaactgataatgaatttcacgaattagacttaccttcagaaacaaaaaccttctttgagttagatgaagctggtattagctttgtttttaacttaaattatttaggaacattattgccaacgcaagtatttgcccaagatatggttggacgtgaaggagcgaatattattaatatctcttcaatgaatgcttttacccctctgaccaaaataccagcttattctggagctaaagcagctattagtaacttcacacaatggctagctgttcatttctcaaaagttggtatccgttgtaatgctattgcacctggtttcttggtaacaaatcagaaccgaagcttgttatttactgaggacggtcagccaactgcgcgtgctgagaaaattcttaataatacaccaatgggaagatttggagaagcaagtgagctgattggcggattgttctttttagcagatgaaaaatcatcaagttttgttaatggcgttgtccttccgattgatggtggatttgctgcttactctggtgtttaatttacaagataatagccacttaacacataagagattattgagttgagtggttttttaaggaaatttgtttaatgatcttaccactaaatgatgggtaggttgctaattggaaaatcctcataagttagataaatttagaaactggagataatatggtagatacaaatcacaaaatcgctttttgcatagattctgatggttgcgcaatggatacaatgacatataagcatcaactcttttttggtccaattgctgcagatatatttgggatatcagaacaagaaagaacaagttttttaaaagagtgggatagagtcaatctttattcaagaactcgtggagttaatcggtttgtgggattggttatgggccttgagtttgccggagtagaacatattgataaattaaaagaatgggtcgaaacaacagactcattgtccaataattccttagagttagcgcttgccaacgattttagtagagatttagagaaggctttagaatggtccaatgaagtgaatcgccaaatcaaaaattatgagggagattctttagcgttttcaggtgtgttagaaagtttagaacgattaagtcaatttggtaatgtttatgtcgtgagttctgctaacaaggaagctgtttggcaagagtgggaagaacagggattgctaaagtatgttgatgatatctattgtcaagatagaggtaaaaaagaagatgttatcgccactttaattgcaagtggttactgccgtgaaactattttgatggtaggagattccctgggtgatctggctgcagcagaacaaaatggtattgcattttacccagtacttgttggtaaggaagtcaaatcatgggaaattcttagagaagatattggtgaagcttttgcaaaaggtcaattcgaacagcaaaggcaaaaagaatctattaataccttttgggctaatttagataactaatagaaaggataggctatgacacatttagttgacttaacaaagaaacccttcaatctaaatcaagaagcaattgagtggattgaaaaaacaattaatgagatgacattggatgagaaaattgggcaactttttttcaatatgggagctagtcgttcagaagaatatttaacagatgttttggatcggtatcatattgctgctgttcgctataatagaggtagttcaagtgaaatctatgatcagaatttaattttacagacaaagtcgaaattgccgatgttgattgctgcaaatacagaagctggtggagacggtgctgtcacggatggaactaaagttggcgatgaaataaaagtggctgctacaaatgatccgaaatatgcttatgaaatgggaagaatcgcagggatggaggcatctgctgtgggttgtaatgcttcattttctccaattgtagatttgacacgtaattggcgtaatcctatcatagctagtcgaaattggggtgctaacgttgatcaaattatttcactttcaaaagagtatatgaaaggaatcatgcaatataatattgtacctttcgctaaacattttccaggggatggcattgatgagcgtgatcatcatttgtcatttgcttccaatcctatgagtaaagaggagtggatgtcgacatttggccgcatttatggtgaattggctgacgcaggtttaccaggagtcatggcaggtcacatacatttaccaaacgttgaaaaagaaatgcatccagagcgagaccttgatgatatgttaccagcttcattgaataaaacacttttagatgagttattgagaggagagttaggttataatggagctattgtaacggacgcttctcatatggttggaatgactgcttcaatggcaaggagagatttgttgccaacggcgattgaagcaggttgtgatttattcttattctttaatgaccctgatgaagacattcaatggatgaaagaaggttacgaaaaaggtattctaacagaggaacgtctccatgacgctttacgtcgtactctcggtctaaaagcgaaattaggcttgcataactatgagggacgtcgccaagaactctttatgcctaaagataaggctatggctttaatcaacacattagagtcgcaaaaaatagctgatgaagttgctgataaagcagtaactctggtaaaagataaacaaaaagatatctttccagtaaatccagaacgttatcgtcatatcttacttgttaacgttgaaggatataagggaggttttggtgcgatgattgctggaaacaagcaacgtgcatcggattacatgaaagagttacttgaggcacgtggccatgaagtaactgtctgggagtctaccgaagagcgtattatgaaattgccacaagaggagcgggcagcagctatcgctaatgtttacgcacaaaaacagccaatcgcaaatctaacagaacactatgacttgattattaacttggtagatgtcaatgctggaggaacaacacaacgtattatttggccagcagctaaaggcacccctgatcagcctttttacgttcatgaaataccatctattgtgatttcagtacaacatgcatttgctttagcagatatgccacaggtagggacttatattaatgcttatgatgggcttcctagcacgataagtgcagtagttgcgaaattggctggagaatcagaatttacaggagtttcaccagtagatgcttactgtggtttaattgatacacatttatggcgccaatgctaatagaaacaagatgatgtacttttatgtaacataaaaaaagagcttaaagctctttttttatccttcaaaatagagtagttccttgggtgttttggtaaatacttcaaagccggttttagtcacataaccgcagtcttcaattcgcacaccaactttatctggtatataaatacctggttcaacagagaagcacatgccttcttgaatctccatatcgttaccagccataatagatggaaattcatggacatccatacctaatccatgaccaaggcggtggttaaagtattgtccataaccagccttttcaataacatttcttgctgctgcgtcaacttcagaagcaaggactcctggcttaataaaatcaatagccgcttgatgtgcttcaagacataaatggtaaatatcttttttgaattgatcaggtttccccactgctactgtacgggtcatatctgacgtataacctagtgtttctacacctaaatcaaataataacaaagcattattttcgattttattagttcctgggataccatgtggatttgctgcattattgccagtcaaaaccatagtgtcgaaactcattttattgataccttgttttttcatttcaaattcgatttgagcgataatatcggtttcagtgttgtttagcgagatattgtcaaatccaacttgaacagctttatcagcaaattctccagcgactaacattttctcaatttcatctcgtgatttaattaggcgcatgttttgaatataaggtgttaggttttcaaaatgaccatcaaaaacggtttggagaccttggaatttagtaacattaagattatcaaattcggctagaactttagaaacagaaaaggatggtaagttgctagctattttttgccaaggattttctgaatctatgtaaccaaagacgggaaatggtacactttgttttgcacgcgatacttctagtgctggtacaaataaaataggatcgcgatcttcatagacaaataaaaacatttgtctttcatggggatcgcaaaagaaacctgttaaatagttgactgtcacaggatcagaaaagacagcaagttcagcttggactgaatgtaagtgatggcgtatacgattaagttttgacataataacccttcttcctaaaaggaacttagtctagttaggctagtttcttatgcctattatttttccaaaaaaataggaaaaaatcaagtttagttagtattttgaaagtttttcataaaaaagctttataaaagcttgaaagtgtttccaaaaggtgataaaatatcagtgaaagcgtcattttcaaatagaaaggaagttaaatcaatatgaatacagatgatacgattacgatttatgatgttgcccgtgaagcaggtgtttcgatggcaactgttagtcgtgtggtaaatggaaataaaaatgtcaaggaaaatacacgtaagaaagtccttgaagttattgatcgtcttgactatcgtccaaatgctgtggcgcgtggtttagcaagtaaaaaaacgacaactgttggtgttgtcattcctaatatcgcaaatagctacttttcaattttagcgcgtggtattgatgatattgcagcaatgtacaaatataacattgtccttgcttcaagtgatgaagacgatgataaagaggttaatgttgttaatactttgtttgctaagcaagtagacggtattatttttatgggacaccacttaactgaaaagattcgtgcagagttctctcgttcacgcacaccgattgttttagcaggtactgtggaccttgagcatcaattaccaagtgttaatatcgattacaaagcagcagcagttgatgttattgatattttagctggcaatcataaagacattgcttttgtatcaggaccacttattgacgatattaatggcaaggttcgtttggcaggatacaaagaaggtctcaagaaaaatggcttaaactttaaagaggggttggtttttgaagccaactaccgttatgctgaaggctttgcattagctcaacgcgtgattaatgctggagcaacagcagcatatgttgctgaggatgagttagcggcaggtttgttaaatggtctttttgaggcaggtaaacgtgttcctgaagattttgaaattatcacaagcaatgactcgccaatcgcacaatatacacgtcctaacttaacttctatcagtcaaccggtctatgatttgggtgctgttagcatgcgtatgctaacaaaaattatgcacaaagaagagttggaagaaaaagaaatagtgcttaatcacgggattgttaaacgtggcacaacaaataattagtgttagagtatgttatttgaaaaatagtggtagaatggtagtagcttagcgcttaactttctgatacttaacatgatatattgagaggattagggtagcttagcttcctaatctttttttagaggtgtaatatgacaaatgaattgataatgcaagcttttgagtggtatttacctagtgatgggaatcactggaagaaattagaggagtctatatcagaccttaaaaaacttggaattagtaaaatctggttaccaccagcatttaagggaactagcagtgatgatgtaggatatggtgtttatgatctctttgatttaggagaatttgaccagaatggaacaattagaacaaaatatggtaggaaagaagagtatctaaagcttattaagtcgttaaaggcaaatggcattaaaccgtttgcagatatcgttcttaaccataaagccaatggtgatcataaagaaaaatttcaagtcatcaaagtcaatcctgaaaatcgtcaagaagcattaagtgaaccctatgagattgaaggatggacgggatttgatttcccaggtagacagggtgagtacaatgattttaaatggcactggtaccactttactggtttagattacgatgctaaaaataatgaaacagacatctttatgattgtaggcgataataaaggttgggcagacgatgatttgattgatgatgaaaatggtaatttcgattatctcatgtacaatgacattgattttaagcatcctgaagttataaaaaacttacaagattgggctaagtggtttattgaaactacaggcattgaaggttttcgtttggatgctgtgaaacatatcgattcttactttattcaaactttcattaatgatattcgtacaaaaataaaacccgatttagaggtctttggcgaatattggaaatctgaccaaacatcaatgaaggactatttagaggcaacacaatttcaattttctcttgttgatgttaccttacatatgaatttttttgatgccagtcaccaaaaccgtgattttgatatgcgaacaatttttgatgatagtcttgttattgataatcctgagtatgctgttacattcgtagaaaatcatgatacgcaaagtggacaagctctagaaagtagagtggaagattggtttaaacctttagcttatggcttgatacttttacgccaacaagggactccatgtcttttttatggtgattactatggcattcaaggagaatttggtcaaccatcctttaaagaggttattgataaaatggctgagctacgccaaaactatgtatttggcaaacaagtcgattattttacgcattcaaattgtattggttggacttgtcttggggatgaggaacataattcttgtttagctgtggtcctaacaaatggtgatcagggatggaaacatatggaagtaggggaaatttatgcaggcaaaacgtttgttgattatttaggtaattgtgaacaagaggttgttataggagatgatggttggggtgattttttagttgaatctgcgtctatctcggcttgggttcctaaaatagaggaagctaactgataaatcaggtgaaaaaaaaggtaaaatgagatataataagacctatgaaagttttactgtatttagaggctgaagaatacttgaaaaagtcaggtatcggtcgtgctatcaaacatcaagagaaagctcttcaaattgctgggatagattataccactaatcctacagatgactttgaccttgttcatatgaatacctatggtattagaagttggcttttgatgagtaaagctaaaaaaactgggaaaaaagtaattatgcatggccattccactgaagaggactttagaaattcttttattggctcaaatttagtatccccgctttttaaatggtacctttgccgtttttatcaaaaagcagatgccattataaccccaactgattattctaaacaactaataaaagcatatggcatcaagaaaccaatttttgttttatctaacgggattgatctaagtcgctatcagaggtcagaaaagaaagaatctgcatttcgtcactattttcacttaagtaaggatgataaagttgttatgggggccggtctttatttcatgcgtaagggaattgaccaatttgttgaagtagctgcaaaaatgcctgatattcgttttatttggtttggagaaacaaataaatgggttattcctcgaaaggttaggcaaatcgttaccaagcaacatccctcaaatgttacttttgctggttacataaaaggtgatgtttatgaaggtgccatgagtgctagcgatgctttcttctttccgagtcgtgaagagacagaagggatagtagttttagaggctttagctagtcatcagcatgtggttttaagagatatccctgtgtatcacggttgggtgaccgaagacagtgttgaattagcgactgatgttgatggttttgttgaaaagttggataaagtcttatctggtaagagtgataagattaaagaaggttatcatgtggctgagagtcgaagtatcgaacgaattgcccatgaattggcaagtgtttatcaaaaagtaatggagttgtaagatgcgtataggtctatttacagatacatacttcccccaagtttcgggagtttcaacaagtatccgcactttaaaggaagggttggagaaggaaggacacgaagtttatattttcacaactaccgaccgtaatgtcaaacgttttgaagaccctacaattattcgtttaccaagtgtcccttttatttcttttacggatcgtcgagtagtttatagaggtttaatttctgcttataggatagctaaagactacgaacttgatattattcatactcaaacagaattcagcttagggcttttaggaaaattagttgcaaaagctttaagaatacctgttgtgcatacttatcatactcaatatgaggattacgttggttatatcgcaaaaggcaaattgattaagccaagtatggtcaaatatatcatgcgtacctacctaagtgatttggatggtgtcatatgtccttctcgaattgttctcaatcttctagatggttacggtgtcaaaattccaaaacaagttattccgacaggtattcctgttgagaactatcgtcgagaggatatctctgaagaaacaatcaagaatctacgaacggagcttggacttgcggataatgatacaatgctattgagtttatcacgggtatcttttgaaaaaaatattcaagcaatcttgatgcatttatcagctgtcgttgatgaaaatcctcacgtaaaattagtgatagttggagatggtccttatctttcagatctaaaagaacttgttcactctttagaacttgaaaattcagttatttttacaggtatggttgagcatagccaagtggctatctactataaagcatgtgatttctttattagtgcttcaacaagtgaaacgcaaggattaacttacattgagagtctggcgagtggacgtccaatcattgcgcaaagtaatccttatctagatgatgttatttcagataaaatgtttggaactctgtacaagaaggaaagtgatttggcagatgctatcctagatgcaatagcagagacacccaaaatgactcaagaagcttatgaacagaaattatatgagatttctgctgagaatttcagcaagtctgtatatgctttttacctagactttctgatttcacaaaaagctagtgtgaaagaaaaagtctctctgacaataggaaataaggatagccattctactcttcgttttgtcagaaaagcggtatatttacctaagaaagtttttacctttacaggaagagcctctaaaaaagtggtaaaagcacctaaacgtcgtatttcatctattcgagattttttagattgagacgaataaaattagtaaatgtcttgaaattataaaaaatattgttataataaaaaatgaagacatgttaggttctaatagattttaagagcgagcactggttggtggaaagagtgcaattagagaacttagtactacttccttgattttatgcaaacataaaagggtggttcccttatcgccactagaggtctgacacaagtatactcgagtttttgtgttggataaattgaggtggaaccacgtagtctttacgtccttttggatgtaaaggctctttttttataaaagaagtggttgcataaaagaggcagattgctttgctaatgttatacttattatccctagctaggataatgtggaattcaatcaaaggtcaatccctttgtttattagtgaattaatgtgtttaggaattggtatcatcctaacagttattaagaaaaggagaacaagatgattaaaatcactttcccagatggtgcaattcgtgaatttgaatctggcatcacaacatttgaaattgcacaatcaatttctaactctttagctaaaaaagctttagctggtaaatttaatggtcaacttattgatacaacacgtgctatcgaagaagatggtagtattgagattgtaacacctgaccacgaagatgctttaggagttcttcgtcactcagcagcgcatttatttgctcaagctgcaaaacgcctttttccagacttatgtttaggtgtaggtccagctattcaagatggtttttactacgatactgataataaatcaggtcaaatttcaaatgatgatcttcctcgtattgaagaagaaatgaaaaaaattgttaaggaaaatcacccttgtattcgtgaagaaatcagtaaagaagaagcgttagaactttttaaagatgacccttataaagttgaattaattagtgaacatgctgaagatggtttaactgtttatcgtcaaggtgaatttgtagacctttgtcgtggacctcatgtcccatcaacaggacgtattcaagtctttcatcttctaaatgtcgctggtgcttactggcgtggtaacagtgataatgctatgatgcagcgtgtctatggtactgcttggtttgataaaaaagatttgaaagcatatcttaaacgccgtgaagaagctaaggaacgtgaccatcgcaaattaggtaaagaacttgatttatttatggttaatcctgaagtaggtcaaggattgccattctggttgccaaatggagcaactattcgccgcgaattggaacgttacattgttgataaggagattgcttcaggttatcaacacgtttacacacctccgatggcatctgttgaattttacaagacttctgggcactgggaccactatcgtgaagatatgttcccaacaatggatatgggagatggagaggaattcgttcttcgtccaatgaactgcccacaccatattgaagtttataaacatcatgttcattcatatcgtgaattgccaattcgtatcgctgaacttggtatgatgcaccgttatgaaaaatcaggggccctcacaggattgcaacgtgtacgcgaaatgacactcaacgatgcccatattttcgttacacctgagcaaattaaagatgaatttcttaaagctcttaatcttatagcagaaatttatgaagattttaacttaacagattaccgtttccgcttatcttatcgtgacccagaagataaacataagtattatgataacgatgagatgtgggaaaatgcacaagctatgctaaaagaggctatggatgattttggattagattattttgaagcagaaggcgaagcagccttttacggtcctaaattggatatccaggtgaaaactgctcttggtaatgaagaaacactatctactatccaactagatttccttcttccagaacgctttgatctcaaatacatcggtgcagatggtgaagaacatcgtccaattatgattcaccgcggtggtatttcaacaatggagcgctttacagctattttaattgaaacttacaaaggtgcctttccaacttggcttgctccacaacaagtttctgttattccaatttcaaatgaagcccacattgattatgcttgggaagtggctcgtgtccttaaagatcgtggtattcgtgctgaagtagatgaccgtaacgaaaagatgcaatataagattcgtgcggctcaaacccaaaaaattccatatcaattgattgttggtgataaggaaatggaagaaaaagccgtaaatgtgcgccgctatggaagcaaagcgactgaaacaaaatctatagaggaatttgtagaaagtattttagctgatattgcaagaaaatctagacctgacgaagttaaataaattttattagtcattataaaaatcattaataaatgatgtgaactgattactgtatgatgcagaatcagttttttagatgctaattttttctttatgtttaattataagctaattatagataaataatctcatataacattcacaaaattagatttttttggtataattaatatgattgacacataaaggaaaatagtattaataaaaaggggtatggagcattgcgaacagtattagtagtgcaaggtgatgacgaaacaatagagttattaaggtcgtatttagagggagctctttataaggttgtgatggctagtgatggtgaggaggctttttctttatttcagcaacatcagattgatttagcaatcatagatattacgctacctaaaatagatggatatgagttgacgcgactcattcgtcaagatagtcagattcctattattatgctagcagctaagacaacagatatggacagaatattaggattgaatattggagcagatgattttatcacgaaaccgtttaattctttggaggttttagctcgaattaattcgcaactgcgtcgttactatgaattcaatagtcttgccaaacctaaaaatcaatttataaagataggggaattggaattagatgaggaacatgttgaactaactaaaaatggtaaacatatcaagttgactgctacagaatttaagattcttcatatcttaatgtcatcaccaggaaggatttatactaaaacacaactctatgagaagattaatggtaggtatttagaaggtgatgagacaacgattatggtgcatatttctaatatccgtgacaaaatcgaagatgatagtaaatatcctaaatatataaaaacacttagaggagtaggatataaaatcgaaaaaccgcagtatcttgtttaaaaatataatggctagtaagagccattttttagtgaagatatttcttggttttaagctttcctttttgctataataagtaaaattggaggggagagatatggcaaagaccgctcttaatattccttttacagttgaagggatagaaaattattatcaaaatataaaaatgatactgtctttagcagataaatggagcatacctaaagatgatctattactttttttaaagggcctcaaggctattgatgatataaaagttggctctcctatttttaagtatttttggacttctttaagtttacaagcacccctcaaagctttagaattcgtgttagagcaggctaaaatgccaactgaattgtcaggagaattatcagaaacacaatacttggtcgcacagttttcagatgagttagctccacatgatgatttctggatagccttatcacaagttatttatgattcttttcctgggaatagtctagccgaagatactgtattaaataggaaactccatcaattccgctatttgatttctagtcagcaagcacagtatgttcgacgatactttaaagatgttggtatgactgatagagatgctttagtaaactacctatcatgtttaagagaaccagatagtatcgcctactatgaatctgctcgcttgcataataaacgtcggagaaatggtgaaatctttggtttcccagatgatgagccggttattaatagtaagcttttaatttcattccatacggaatttattattgatgacaaaggaaactttttaaacgagattgacgcagaagtaataacacgtaatggtattatcaatggagctagctttaattatgcttttaaaaataatacacgtcataaagaattagatgttgatcctgtaaagttagacccaaaatttcgaaacgatatgactagaggttatagatcgccaaatctatctagaaggaaatggtttttctttaaagaagaggattacgattgtagttatttcaataaaaaaggatattacgcatttggaaggcgtagtgctaagcaatcggttgataaacaagtcaaatacttgaagaaggctgtgcagaaaatgcgcatcaactgatacatatactattaaaagataccatagtactatggtatcttttaatttgaggtattaatgtcaaatggttttttattgaccacatgtttttataaacgagtggtcaaaattgaagaagtatctagcttatgttaaaatataattgaataatagaaagaaggtgctgtatgattaagaaaaataaagtttttttaggagttcttttagtccttgttgttatccttggaggtggtgtattattttaccaatcacaattccaaaagacaactaatcaagcgttagctattgcttataaagatgctaaagtggctaagaaggatgtcatacatcaaaaaattgacaaagaatttgaaaactttagagggagctacgaaattgaattcaataccaaaagcgcagaatacagctatcatgtagatgttaagactggacaaatccttgagcgggacatggataataatggcttttcaaaatcgacttctcagtcaagttcatcgtcaagtcaaaaatctcataaaataagtcaagaagaagccaaaaagattgcatttaaagatgctaatatagaggaatcagaagtcagtaatcttaagatcaaagaagaaattgaaaatggaaaatcagtttatgatattgactttgtggacctgaaaaataaaaatgaagttgattatcaaattgatgcagaaactggaaaaatcattgaacgttctagagatcatatgaatgattaatttaaataagatataaaaaaacgaaggtctaaaaggccttcgttttaattactcagtagcttgctcccaacgttttgaaagtttacgtgaaaaacttgagatgataaagtttgtaatgaaatagacagcagttataatagcgtagagtgtaaaaacttgtccagcttcgaaatatcttcccattagaatttgactttttccgaagatttcttgaatagctataacagaataaagtagtgatgtatcttttataaccgttacaaactgagaaataatggctggcaacattttgcgaaaagcttgtgggaaaataataataatgaaaacttgcaaataagtgaatccttgagaaagtccagcttctgtttgtcctttatcgactccatttaaacctccccgaataatttctgctaaagcagcggaggtaaaaattgtaaacgaagtaataccagcgctgactgatttcatctggaatactaagaaaatgataaaaatccaaagtagatttggaacatttctgacaaattcgatatagatactagctattaatttccagataggatttttgctatttctcataattgctaatagagttccaaaaaacattgatagtaaaatggaaataaaagatatatataaggttaaaccgaacccttgaaggagaaatagtatctttgttagtgttaagactgatgacatatcaaacctccttaagaataagttttcttatttaattcttcttgttttcttgcccagcttgctagtgggaaacaaataacaaaatagaagatagcagctcctgcaaaagctgggatataattagtcgtatcataagcccaggccttagctacaaacatgatatcggctccagaaatgattgctacggtagaggtattcttgattagattaacaacttggttggtcattggtggtaaaattgttctgacagcttgaggcaaaatgataagttgcatggtttgattagctgtgaatccttgagctaaagcagcctctgtttgtcctttagggacagcttcaattcctgagcgaataacttcagaaatataggcaccatggtatagtccaacgcacaaaacggcggtgaaaaaagcactaatcataacatgtccattactaatgattgctagtccatagtagacaaaaaccatttgaactaaaagaggtgtgttttgaaaaacttcaacatagatacgtgatatcaacttaccaactttacttttagaagttgataaaccaccagagagaattcctaatatcagagcaagtaggagtgcaccaaacgaaatacctagagtatataagaagcctttaaagaataggtcgaaatggttaaagaaagcgccccaccttgaaatggcaaaaggactgatgtttaataaagtcataaaaaatcctccctattctttttttactttagcgggtttaagcttaaatttttgataaatgtgttttaaactaccatctttttcccatgataccagtaacttattaacgtagggaatcaagactttgtcctgtttactggttgcaataccgtattcttgcgtattgaacccttcttttaatatggttgtatgagggctaaggtagccgctaaggatagatttatcaactgaaaaagcatcaatacgattagcgtacagcgatatcgctaattctgggaaactccctaattgagcatagctaaattttagcttgtgttctttagcatatttttctaaattgacttttgtagtggcaccttgagccacaccaatgtgtttaccatccaattcttttatagttttgatatgactatttttacgcaccaaaaatccaatttcatcgtgataataagctttagaaatattatagttagcttttctttcgggcgtgatagtgtatgttgcgattagaatatcaatttgcccattgtccatcagaggctctctggtttgtgcggttgtcggtacaaaaactggtttgacacctaaggatttggcaatttttttggcaatatcaatttccattccttcgtattgattcgtctcagcattataataaccaaagttaggcacatcttgtttgactccaactttaaggacgcccgattttttgatttctgataattgattagctgacgttgagttaggataaaataacaggaaaataaaaatacaggataatagatagaacgttaatctttttcgtctcagcatatttcgtcctcctaaaggtcagtactggtatggttgataatgttgcttaaaaattgtttagcacgtggttctctgggattatcaaaaaagtcttgtacatctgtagtatccactaaaatttccccatcagccataaaaataatacgatcagcaacttctcgtgcaaatcccatttcatgagttacaacgaccatattcattccgtcatttgccaatttttgcatcactgaaagaacgtctccgatggtttcgggatcaagggcagaggtaggctcatcaaagaggaggagttttggatgcatggcaagccctctagcaatagcaattctttgtttttgaccacctgatagcatagatgggtaggaatcttttctttcccacatattgacaaattttaaatatttttcagcaatttccatagcttcttttttagattgttttaatactttaataggagctaatgtaatattttctaacacggttttgtgaggataaaggttaaaatgttgaaaaaccataccaacttctttacggaggttgaccaattctttagatgaaatatttgctaattcatgtccattcacgaccaaactaccatcgtcaatagattcgagagcgttcattgttctaataagtgttgatttacctgatccagaaggtcctaatagaacaaccacttgccctggctctatttccaaattaatctgacgaagggcgtgataatctccataatacttgttaacattcttataagatatgagtgacataagaacctcctaaaataacagtttattgttaggttacctaacattatagataagtgtatcacctgtttgtgagcttgtcaataaattcagaatattaaagagtaggattgatttaaatattgctatttttagagcggtatttttagtaaaaatattacgttctcgtatcatttatttttcagtttaataggatgtattgaaagtttccaattaactaggaaatctgttataattagtgataatagtggtgctttaggcccatattatcatattttcggtcacttttatttttcagtttatgaatggaagtgggagaccagaaagtaatagaggtaaaatatgaaaaaaatacttatcgttgatgatgaaaaaccaatttcagatattatcaaatttaatttaaccaaagaaggatatgagacggcgacagctttcgatggccgtgaagctttagtacaatatgcagaatttcaaccagatttaatcattttggatttaatgcttcctgaactagatggtttagaagtggctaaggaagttcgtaaaaccagccatattcctattattatgctttctgcaaaagacagtgagtttgacaaagtcattggtttagaaatcggtgcagatgattatgttactaaacctttttcaaatcgtgaacttttggcacgggtcaaagcacatttacgacgtactgaaaatattgaaacagctgtagcagaagaaagtgctcaaaatgcttcttcagatattactattggtgagttgcaaattttaccagatgcctttattgctaagaaacgtggcgaagaaattgaattaacgcaccgagaatttgaattacttcaccatttagcgacacatatcggacaagtcatgacacgcgaacatttattggaaacagtttggggatatgattattttggagatgtccgtacagttgatgtgacggtgagacgtttacgtgaaaagattgaagatactcctggtcgtccagaatatattttgactcgacgtggtgtaggttattacatgaagtcttatgaataatagtgctgcaaatattaggtcgtttgagctagccttactttttttactagtttttgttgctgtttattttgtttatctagcggttagagattttaaaatgtctaaaaatatccggcttttgaattggaaagtcagagatttgatagcaggaaattattcagatagtattctaattcaaggtgatgcagatttggtagaattaggtgaaagtctaaatgatttatctgatgtcttccgaatggcacatgataacttagaacaagaaaagaatcgcttagcaagtatcttaacttatatgactgacggtgtgctggctacagatcgttcaggaaaaatcgttatgattaatgagacagcccaacagcagttcaatctagcatatgatgaagctttatcaatgaatattgttgatatgttagggtcgggaagtccatattcgttccaagatttagtctctaaaacgccagaggtagttcttaatagacgtgatgaaaacggtgaatttgttaccttacggattcgatttgctttgaaccgtcgtgaaagtggttttatttccggtttagttgcagtgtcacacgatgctactgagcaagagaaagaagagcgtgaaagaagactttttgtatctaatgtttctcatgaacttcgtacacctttgacatctgtaaaatcttatttagaagctttagatgagggagcgcttaatgaagaagttgctccaagcttcattaaggtatctctagatgaaacaaatcgtatgatgcgtatgatatcagatttattaagtttatcgcgcattgataatgaagtaacgcatttagatgttgaaatgacgaattttacagctttcatgacctcaattttgaatcgatttgatcagattagaaatcaaaaaacagtcacaggaaaagtttatgaaattgtcagagattatcctcttaagtcaatttgggtggaaattgatacagataagatgactcaagtgattgataacattttaaataatgcagtcaagtattcaccagatggtggtaagatcacagttaatctacgcacaactaaaacgcagatgattttatcaatatcagaccaaggcttaggtattcccaaaaaagatttacctctcatctttgatcgtttttatcgtgttgataaggcgagaagtcgtaaacagggtgggactggacttggtttgtcaattgcaaaagaaattgttaagcagcataagggatttatttgggctaagagtgagtatggtaaagggtctacttttacaatagtcttgccttatgataaagatgctgtaacttatgaagaatgggaggacgttgaagattaaaacatgtcagaaataggatttaaatatagtatcttagcttcaggttcaactggaaattgtttttatattgagacaccccaaaaacgtcttttaattgacgctggtttaacaggcaagaaagtgactagccttcttgcagaaattaatcgtaaaccagaagatttagatgctatactagttacccatgaacattctgaccacattaaaggtgttggcgtattggctaggaaatatcaccttgatatttatgccaatgagcagacgtggaaagttatggatgagcgtaacatgttaggcaaagttgatgttagtcaaaagcatgtttttggacgcggtaaaaccttaactttcggggatttagatattgagagctttggtgtaagtcatgatgctgtggatccccaattttaccgtatgatgaaagatgataagagctttgtgatgttgacagatacaggatatgttagcgaccgaatggcaggcttgattgagaatgcagatggttatttgatcgagtcaaatcacgacattgagattctacgttcgggttcttatccttggacacttaagcaacgtattttatcagataaaggacatttatctaatgaagatggttcagaaaccatgattcgcactataggtaaccgtactaaacacatctatttaggacacttgagtaaggaaaataatattaaggaacttgctcacatgactatggaaaacaatttaatgagagctgactttggtgtgggcacagatttttctgttcacgatacttcacctgattcagctaccccactgacgaggatttaagattgaaaaagattttttacattagtttaggatttattagtttagggataggcattgcaggtattgtcttgccggtagttccaacgactccattagtattgctttcagctttttgcttttcgagaagctctgaaaaatttgatatttggttgcgtcaaactaaagtttataaatactacgctgcagattttgttgaaagcagaagtattgccccagcgcgtaaaaagtcaatgatttggcaaatttatatcttgatgggaatttcaatctattttgctcctctaatgtggctcaaactgggattattgattggaactattgtaggaacttatgtgcttttttatgtagtacctgataaaattgatgaatagttaacaagagactaggtgtgtatcctagtcttttgttgaatattcaaatatgtaattaaggaaacgttttctttggaagataggtttaacttccaaaatgtttgattatttgtcaactgtggtataatggtatttgtttaatattttatctatgattgaaatcaaggagaaaaaaatgaaagaattaagatcaaagctggaaaaagactatggtattgtttttgctaatcaagaattattagatacagcttttacccatacatcatacgcaaatgagcatcgcctcctaaacatttcacataatgaacgtttggaatttttaggagacgctgttctacaattacttatttcacagtatctttttacaaagtaccctcaaaaggcagaaggtgatttatcaaaattacgttcaatgattgttcgtgaggaaagtcttgcaggtttttcacgtctatgtggctttgatcactatattaaacttggaaaaggagaagaaaaatctggtggacgtaatcgtgacactattttaggagatttatttgaggcttttttaggagctttattattagacaaaggtgttgaagtggttcatgcctttgttaacaaggtaatgatccctcacgttgaaaaagggacctatgagcgtgttaaagattacaagacaagcttgcaagaattacttcaatctcatggggatgtaaaaatagattatcaagttactaatgaaagtggtccagcacatgcaaaggaatttgaggtgactgtatctgtcaaccaagaaaatttgagccaaggaattggacgatcaaagaaagctgctgaacaagacgctgccaaaaatgctttagcaacgttacaatgaggaaatcatgtttttaaaagaaattgaaatgcaaggctttaagtcctttgcggataaaactaaggtagaatttgatcaaggagttactgctgttgtaggtccaaatggatcaggtaaaagtaatatcacagagagtttacgttgggcattgggagaatcaagcgcaaaaagtttacgaggaggtaagatgccagacgttatatttgctggtacagaaaatcgtaagccccttaattatgcgcaagtgagtgttactttagataatagcgaccattttatcgaaaatatagctgacgaagttcgagttgaacgtcgtatttttcgaaacggagatagtgaatatttaatagatggacgcaaagttcgcttacgtgatattcatgatttatttatggatactggattaggaagagattctttttctattatttcccaaggacgcgttgaagctatttttaatagtaaaccagaagagcgccgtgccatatttgaagaagccgctggtgttctgaaatacaaaacacgtaagaaagaaacacaatccaaattagaacaaactcaagggaacttagatcgcttagaggatattatttatgaattggacatgcaagtccaaccattagaaaaacaagcaagtattgccaagcgttttttagtattagatgaggaacgacaaggactccacttatctattttgattgaagatattttacaacatcaatcagatttaactactgttgaggaaaagctattgacagtaagaaaagagttagcaacttattaccaacaacgtcagtcccttgaagatgaaaatcaatcgttaaaacagaaacgtcaccatttatctgaagaaattgaggctaaacagttagctcttttagacgttacaaagttaaagtcagatttggaacgccaaattgatctgattcgtttagagtcaaaccaaaaggctgaaaaaaaagaagaggcaggtcaacgcttagcagagttagaaattaaagctaaagattgtagtgaccagattacccaaaaaaatatagagttaactactctgtcggaaaaaatagcccaaataagatcagaaattgttagtacagaaagttccttggagcgtttttcaactaatccggatcagattattgaaaaacttcgagaagactttgttaccttgatgcaagaagaagccgacacttcaaacgctttaacagctttactagctgatatagagaatcaaaaacaagcttctcaagctaaatctcaagaaatacaagaagttagcaaaaatttagaagtattaaaaagtaacgcaaaggtagcattggaacgatttgaggctgcaaagaagaatgttcgtcagttattatctcactaccaagatttaggtcaaaccttgcaaaatctagaaggtgagtataagaatcagcagtcaattttatttgatcatttagatgaaatcaaatcaaagcaagcacgtatttcgagtttagaatctattttgaaaaatcatagtaatttctatgctggagtgaagtcagttctacaggctaaggaccagcttggaggtatcataggtgctgttagtgagcatcttagctttgacaaacattaccaaacagcattggagatagctttgggaggtagcagccaacacatcattgttgaagacgagagtgctgccaaacgttcaattgcttttttaaagaaaaaccgccaaggtagagcgacatttctgcctttaactacaataaaaccaagagaattagcacaacattatctctcaaaattacaaagttctcaagggtttttaggaatagctagtgaattggtaacctatgatcaacgcttgtcaaacatttttaaaaataacttagggttaactgctatttttgatacggttgataatgctaatgtagctgcgagacaattgaattatcaagtacgtttagtaaccttagatggaacagagttacgccctggagggtcgtactcagggggagcaaatcgtcaaaataatactgtttttatcaagcctgaattggataatctaaaaaaagaattgaaacaggcacaaagtaaacaattaattcaagaaaaagaagttgccacattgttagagcaactcaaagagaaacaagaaaccttagcacaacttaagaatgatggagaacaagctcgtcttgaggaacaaagagctgatatagagtatcaacaactatcagaaaagcttgctgatttaaataaactatataatggcttgcaattaagcagcggggcgttggaacaaactacttctgaaaatgaaaaaaatcgtttagaaaaagaacttgaacaatttgctattaaaaaagaagagttgacaacttcaattgctcaaattaaggaagataaagattcaattcaagaaaaagtcaataatctaacaacattattgtcagaggcacagctagaagaacgtgatttgctaaacgagcagaaatttgaacgtgccaactgtacacgtctagagattaccttgtctgaaataaaacgtgacattagtaatttacaaacattactaagccatcaggacagtcaattagacaaagaagagcttccacgtatagaaaaacagttgctacaagtaaataatagaagagaaaatgacgaagaaaagcttgtgagtctccgttttgaattggaggattgtgaagctgctttagatgatttagctgcttctctggctaaagagggacaaaaaaatgaaagtcttattcgtcagcaagctcaattagagtcacaatgtgaacaattatctcaacaattgatgatattctcacgtcaattatcagaagactatcagatgacattggatgaagcgaaggtaaaagcaaatgtcttggaagatattttgatggcgcgtgaacaattgaaatctctacaagctaaaattaaagctttaggacctgttaatattgatgcaattgctcaatttgaagaagttcatgaacgattgaccttccttaacacacagcgagacgacttagttcatgccaaaaatttattactagagacgattacagatatggatgatgaagttaagactcgttttaaatcgacatttgaagccattcgtcatagtttcaaagaaacctttgtacagatgtttggtggaggttctgcggaccttattctgacagaaggtgatttattatcagctggggttgatatttcggttcaacctcctggtaaaaaaatccagtctttaaacttgatgtcaggtggtgaaaaagcattatcagcgttagcattattatttgccattatccgtgttaagacaattccatttgtcatcttggatgaagttgaggccgctttagatgaagcaaatgttaagcgatttggcgattatcttaatcgatttgataaatcaagtcaatttatcgttgttactcaccgaaaagggactatgtctgctgctgatagtatctatggggtaacgatgcaagaatcaggcgtttccaaaattgtttctgtaaaattaaaagaagctcaagaaatgaccaattagaaaacagaaggggatcccttctgttttttggattttcagccttattttatgttacaatagtaaatgtaaaccctttagttaggagattccatgataaaattagtagcaaccgatatggacggtacattcttagatgaaaacggtacctatgataaaaaacgtttagcaaatgtgctaaaaaaatttaaagaacaaggaattgtctttacggcagcaagtgggcgttccttattatcacttgaacaattatttgctgactttcgtgatcagatggcttttatagcagaaaacggaagtgcagcagtcttatttaatcgcttggcatatgaacagcacttgagtcgagaacaatacttagatattattgaccatttgagtaagagcccttatatggagaataatgaatatgtcttatctggcaaggatggtgcatatattctaagtgatgccaatccagattatattgaattcatcactcattattatgataatttgcaaaaagtttctcactttgaagatgttgatgatattattttcaaagtaacggctaactttactgaagagactgttagacaagctgaggagtgggtaaatcaagctataccgtatgccacagcagtgacaacaggttttaaatccattgatattattctaagctcagttaataaacgaaatggtttagagcacctctgtgaacaatacggtattagagcagaagaagtcttatcttttggtgacaatattaatgatttagaaatgctagagtggtcaggaaaagctatcgcaacagaaaatgctagaccagaagttaaagagatagcagattgtattataggtcatcacaataatcaagctgtaatggcttatttagaaagtatggtggattaatgtcggatattaaaatacttgccttagatttagatggcactttatttacaacagataagaaagtttcagaagaaaataaagtggccttaaaagcagctagagaaaaaggtataaaagttgttattacaacagggcgtcctttaaaagcaattggtaatttgttagaggacctagagttagtatctgatgaagattacagcattacttttaacggtggtttagttcaacaaaatacagggaaaatcttagctaaaactgcaatgacacgacaagaagtggaagatatccatgaggagttgtatcaagtgggtttgccaacagatatcttaagtgagggaacggtatatagtatcgctaacaagggacaccattctcaatatcatttagccaacccgctcttagaatttatagaagttgatgatttagagcaagtgccaaaggatgtagtttataataaaattgttagtgttattgatgctacatatcttgatcaacaaattgctaaacttcctgatagacttaaagttgactatgaaatgtttaaatcacgtgatatcattttagaattgatgcctaaaggtgttcataaagcagtcggcttagaactactgacaaaacaccttgggttagatagtagtcaagttatggcaatgggagatgaagcaaatgatttatcaatgctagagtgggcaggcttaggagttgcaatggctaatggtattccagaagctaaggcaatagcaaaagcgacaactatttgtaataacgatgagtctggagtcgccgaagcaattgggaaatatattttaagtgaggaaaattaatgggattatttgaccgcctatttggacataagaaaaaagataaagaaccagaaattgaagcatcagaatctgttgttttagaagatgaagattcagttattgataaagaggagggcagcaacttttcgaaggagtcaactttgaatcgaacctctgaagtccctgttgcagaagatgattctttcttagaattagaaagagatacagcattgtcagaatcacatcaaccagttacctctgaaattcatcctttagagtcagaagataccgatgaaattcctgtaaaagaagacgatagttttttagaactagaagatagggctaagacaaaggtagcagatacttctgaggtagaaaatgtagttcctgattccacgactctttctgacaatgtttctgctaaatctgaggcatcttttagtgataaggagcaattaagtgatagtcaggcttcagatcagttttcagaaactccccttcaagaagagatgtctagtggaaaaactgaggtacaaacagagtcagaggatacatctgcggctgatgcttttttagcagattactatgctaaacgtaaagcaattgagaaagaaatctcgtctaattcgctgtcaacagatgagtcagaattttctgaggcacaggaagttttatcgcaatcacaggcagacactataaaagctgagagtcaagaggaaaaatataatcgtagcctgaaaaaaacacgcacaggttttagtgcacgccttaatgctttcctttctaacttccgtcgtgttgacgaagagttctttgaagaattagaagaaatgttaatcttatctgacgttggggtaaatgttgcaacacagttaaccgaagatcttcgttatgaagcaaaattagagaatgccaagaaatcagaggatttaaaacgtgttatcgttgaaaaattagttgaaatctacgaaaaagatggtatttataatgaggctatcaatttccaagaaggtttaaccgtaatgctttttgtaggtgttaatggtgttggaaaaacgacatctataggtaagttagctcatcaatacaagtctcaagggaaaaaagttatgttagtagcagctgatactttccgtgcaggtgctgtggctcaactagtagaatggggacgccgtgttgatgtaccagttgtcactggagaagaaaaagcagatccggctagcgttgtctttgatggcatggaaaaagccgttgctcaaggcgttgatgtcttgttaattgatacagcaggacgtctgcaaaataaagaaaaccttatggcagagttggaaaaaattggacgtattattaagcgtgtcgtacctgatgctccccacgaaactttgcttgctttagatgcatctacaggacaaaatgctttaagtcaagctaaagagttctcgaaaattacaccattaactggccttattctgactaaaattgatggtactgctaagggtggtgtggtactggctattcgtcaagaactagatattcctgttaaattcattggtttcggcgaaaaaatcgatgatattggtgaatttaattcagaagatttcatgcgtggccttctggaaggaattttataagaaaaaagaactttcatttagaaagttctttttatattaaaagacacgataaacataaggattattagctttagaaacttgacgagactcttcaatgtgtaagactggtaagttttgttgtaacaattgattatactcggatttaattgtacctctaacagttacccaagtattgtccggataacttttttgatttccagtcgttagtagaccataaactcctgaatcggcaatacaatgaatgattccaaagcggaaaataaattgatatccttcgtgtttgggttcgttataaacaaacccagtatattgtatttggcgatccatgaattgctcgggatagagataaattagttccataacttccatgtaattttcagttgtgatggttaatgtaccagagcctttatattttttaagctctttttgcatttctttttcataggctgaagaagtaaaataagtgctggtatctggtttcaaatattgaacgcgtgtcccatcttgacttacagtaccagtagagccggctgctagagggaaattatatcccttggcagagactgtggttgagtctaaactaactgtaggtactaacaaacctactaaaacgggaaatactaaaatcattgggcttgttgatttagctattttaccatgtaggtgactatgcattttcatatttttaacccaaataattagctgtacaattgctaaaataaaagataggaccattgaaatataggccaaataggtataatgagtattaatatactgatttagtttacctgataactttaaatacatgcttaattcaaaataaccagcaagaataagaaatcgaatcattatattacccccacaaataaacaatagataataataataagagaagatacactaatgaattggacaataaaccttgttttaaaagaatttaccatcatcattaaattcttaatatcaatcatgggtccaattaaaaggaaagccatcactggcgcgattccaaaggttgataataaagaagcacctataaaagcgtcagcttcactacacaatgacaagatgaaagcaagcaacatcataactaagatggctgtgatagggctatgtccgatagtagtaagaactcgagttggtaaataaatttgcatagctgaagcaattaaagtaccaaatactagatagcgtcctgtatcaaaaaattcatcgatggcatgagctaaggctagaaagattttttgataccacttcttatcagaataatcatgaaaatgagtaggtttagcgtcttcttttagaatattatcatctactaaaaaggcaagcatgactcctaaagcaatggctacaatggtagcacctacaaagcgtaatatcaggaagcgtatggaatttccaaatgctgagtaggtcgcaaataaaacaataggattaataataggggcagtagcaagaaacggaactgccgtgtatgaaggcactttcttttcaaggaatcgattaataataggaatgataccacattcgcaagaaggaaagacaaagccaacgaaggttccaaataagactctgagaaatttatttttcggtaagaacttattgactatatcaggtgttataaagacttcaataattcctgataaaatagttccaagcaaaacaaaaggaagtgcctcaataataatggaaatgaaaatggcaaaccattgaaggacactatccggtaattgattaaagatatccatagaacttaatctttctgagaatcatctttctgttcaggttttgaatcagaatcaacttttttaggttttggtactttagcaaaactagcgaacatactttctaagtcatcttgacgtttgtgcgtaatagccattaatggcacctctttctttatataataacctattatactatattagcttatttttaacataaaaaaacaaatcgattggaaatgatactatatagtgataaaatgttattagtagattgatgaggtaagattatgattgaattaggtattacaacattcggagagacaacaatccttgaagaaacaaaccaaagctattcacatcctgagaggattcgccaattagttgctgagattgaactagctgatcaagttggtttagatgtatatggtattggagagcaccatcgtgaagattttgcggtctctgcacccgaaattgtcctagcagcaggagcggttagaactaataatatccgtttatctagtgcagtaacgattctctcttccaatgatcctattcgcgtctaccagcaattttcaacgattgacgcactttcaaatggtagagcagaaattatggcagggcgtggttcctttattgagtcttttccattgtttggatacgatttagcggattatgatgatttatttaatgaaaaaatggatatgttgttagcaattaactcagcgacaaatctcgattggaaaggtcatttgacacaaacagttaatgagcgaccaatttatccaagagcattacagagacagttaccaatatgggtggcaacaggaggaaatgttgattctacaattcgtattgcagaacaaggtttgccaattgtttatgcaactattggtgggaatcccaaagcatttcgtcaattggtccatatttataaagaagttggtagtcgtaatggacacaaaccagaacaactaaaagttgctgctcactcttggggatggattgaagaggataatcaaaccgctattgaccgttattttttccctacgaaacagaccgtcgataatattgctaagggacgccctcattggtctgaaatgaccaaagagcagtatttacgttcagtaggtccagaaggtgctatttttgtaggaagtcctgaagtggttgcacataaaattataggacttgttgaagcacttgagttagaccgttttatgttacatctaccagttggctctatgcctcacaaagacgtcctaaatgctatcaaactttatggtaaggaagtagcaccaattgttcgaaaatattttgaaaagaattaaagcagatctggtctgtttttttattgttagattataaaaacgctatcttgaaatcgctttttaaaactcttcgtaagtcaaaaatatgctataataaaagcgttatggaaaatttaaatattacacaaattgctattgatttaggtattaaagcgtcacaaatcgaaaaggttttagaattaacagatgaaggaaatactattccttttattgcccgttatcgtaaagaaatgacaggtaatttggatgaagttcaaatcaaatcaattattgaccttgataagagtatgacagctctttcagatcgtaaaactacggtcttagccaaaattgaagaacaaggaaagttgactcaagaactcaaaaaggctattgaagaagcaactaaactagcagatgttgaggaactctacctaccttataaagaaaaacgtcgtacgaaagctacgattgcacgtgaagcaggtctttttcctttagcacgtcttattttacaaaataaggataaccttgaggaagaagctcaaaactatcttacagatggttttgagacaactacgaaggcactttctggagcagtagatattcttatcgaagctttttctgaggataataaattacgttcatggacatataatgagatctggaactacagctcaatcactgcagttgttaaagatgagtcacttgatgaaaaacaggtcttcaaaatctactatgacttttctgaaaaaataagtaaactccatggctatcaagttttagcattgaatcgtggtgagaaaatgggtgttcttaaggttaattttgagcataaccttgaaaaaatgtttcgcttttttgctgttcgatttaaagaaactagccaatatatagatgaccttattgtacagactgtcaagaaaaaaatcgttccagctatggaacgccgtatccgtacagaactaagtgaaggagcagaagatggtgcaatttcactgttttcagagaatcttcgtaacttattgttagtctcaccgcttaaggggaaaatggtgttaggttttgaccctgcctttcgtacaggagcaaaattagcagtagtagaccaaactggaaaattaatgacaacacaagtgatttatccagttcctccagctaatcaagcaaaaatcgaacaatcaaaaatagagttagcaaaacttatcaaagaattcaatatagaaattattgctatagggaatggaacagcgagtcgtgaatcagaagcatttgttgcagaagttttacaagattttccagacgtatcctatgtgattgttaacgaaagtggtgcctctgtttattcagcctcagaattggcacgtcatgaatttccagacttaacggttgaaaaacgttcggccatctcaattgcaagacgtctgcaagacccattagcagaactagtcaaaattgatccaaaatctattggtgtgggtcaatatcaacatgatgttagccaaaaaaaattagcagaaaatcttgattttgttgttgaaactgtagttaaccaagtaggtgttaatgttaatacagcaagtccagccttgttagctcatgtttcaggtttaaataaaacaatatctgaaaatattgttaaatatcgtgaagagaatgggcaaattaagtcacgtgctgaaattaagaaagtgcccagattaggagcaaaagcttttgagcaagctgctggattcttacgtattcctaatgctaaaaatttcttggataatacaggtgttcaccctgagtcttatgaagctgttaaaaagttgcttgaccaactgactatcaaagaattagatgatcttgctaaagagaagttacaaaaccttgacttaattgcaacagcagaaagtattggggtaggtcaagaaacattaaaagacattatagaagatcttttgaaaccaggtcgtgatttgcgtgatgattttgaagcgcctgttttgagacatgatgttttagatgtcagtgatttaaaagttggacaggaattgcaaggaactgttcgaaacgtcgttgattttggtgcttttgttgatattggtgttcatgaagatggtctaatccaccagtctcgccttattaagcgaaaacgcgataaaaaaactagaaaaatgcctcctttacaacatccaagcaaatatctctctgttggtgatattgtaactgtttgggttgtagaggtagatgcggagcgtagcagaattggacttagtcttatcaagccagacggacttgactaattatgttaagaaggtgtctatagaagattttggatgtcagtttttacatactgcacattggaataatcgcttaagaacaactggaggacgcttctttccaaacgatagacaccttgactttaatcccaaaatttatcgtgagtttggtattgatatttttcgtaagattgtaagacatgagctttgccattatcatctctatatacaaggtaaaggatatcaacatagggataaagcttttaaagagttactagaaaaagtcgatggcttacgatatacccctagagttacggctgttaaagtgaattatcatcattactcttgccaatcttgcggtcaagtataccgacgtaggagacgtgttaatttacgcaagtttgcttgtggttattgtcatggtcgcttgatagagagtttttaaaatcagtcgtaaggcctatttaattttactgtcaaagtagttataattaaaatatagagtagatagaaagaaggataggtatgaaatcaagcttctacaaacaacgaaaaggtaagttggtctgcggtgttgtcgccggtctagctgataagtataactgggatttagctctttcacgggtgttgattgcactgattttgtattttaccaaatttggtcttttgctatatattttattagctgttttcttaccctataaagaagatattattgaaacaagaagacaaggtcccagaagacgtaaagatgctgaacctgttgatgatgacggttggttctggtaattcatataaaggagatttgctagatgaatctccttttttcttagctttatttagaccactttttcaaaatatcttctttttttcagaaaaacgcgttagcgcttacttttagtaaaaagtatgatataatgtgggtgtaaattaatgaaagtgtttagtacctttgctcaactttaaattgtagggtatagcaatagggatattcacttttataagaaggagtaagtatggcagttactgttcaaatgttagttgaccgcttaaagttaaatgtcatctatggtgatgaacatctattatctaagcggattacaacagctgacatttcacgtcctggtctagaaatgacagggtattttgattattatgcaccagagcgtttgcaacttgttggtatgaaagagtggtcatatttaatggctatgacaggacataatcgttatcaagtgttacgtgaaatgttccaaaaagaaacaccagctattgttgtagcacgtgatttagaaattccagaagagatgtatgaggcggctaaagataccggtattgctattcttcaaagtaaggcccctacaagtcgtttatcaggtgaagtttcttggtatttagattcttgcttagctgagaggacaagtgttcatggtgtcttgatggatatctatggtatgggtgttctgattcaaggtgattccggtattggtaagagtgagacaggactagagctagttaagcgaggacatcgtttggtagcagatgatcgtgttgatgtttatgctaaagacgaagagacgctttggggagagcctgctgagatattacgtcatttacttgaaattagaggtgtgggaatcattgatattatgagcctatatggagctagtgcggttaaagattcatcgcaagtgcaattagctatataccttgaaaactttgaaactggaaaagtttttgatagactcgggaatggcaatgaagagatcgaattatctggagttaaggttcctcggatacgtattcctgttaaaacaggccgaaacgtgtcagtagttattgaagcagcggctatgaatcacagagctaaacaaatggggtttgatgctacccagacttttgaggatcgtttaacacatttgattagtcagaacgaggtcaatgatgattaatccagtagcaatacgattaggccccttttctattcgctggtatgctatttgcatagtgtctggtatgttgttagcagtttacttagcaatgaaagaggcccctcgtaagaacattaagtcggatgatattctagatttcattctcatggcttttccactatccattgttggagctcgtatttattatgttatcttcgaatgggcttattactctaagcacccagtagagattatcgccatctggaatggcggtattgctatttacggagggttaattaccggggccattctccttgtgattttttcatatcgtcgcttgattaatcccattgattttctggatattgctgctccaggagtgatgattgcccaagccataggtaggtgggggaattttattaatcaagaagcatacggtagggcagtaaaaaatctgaattacgtaccaaactttataaaaaatcaaatgtatattgatggagcttaccgagtacctacatttttatatgagtctctttggaacttcctaggttttgtcatcatcatgtctattcgtcatcgaccgcgcactttaaaacaaggtgaagtggcatgtttttatttagtttggtatggatgtggacggttcattattgaagggatgaggacagatagcctttatttggcgggtttgcgcgtgtcacaatggttatcagttattttagttattatcggaattgtcatgattatttatcgtcgtcgtgaacaacatatttcatattattaaacagaggaggtattatgatagaaattgctgtattaattattgccattgcgtttgttgttttagttttaggaatacttttcgttctgaaaaaagtatcagaaacgattgaggaaaccaagcaaactattaaagtattaacaagcgatgttaacgtgactctttaccaaactaatgaaattttagccaaagctaatgttttagttgatgatgttaatggtaaagtatctactattgatcctctttttgtagctattgctgacttatcagaatctgtatctgatttaaacctacaggcaagacatattggacaaaaggcaagtagtgcaacctcaagtgttactaaggcaggttcagctttagctattggaaaagcggcttcaaaaatttttcgtaaaaaaggagacaaaaaatgagtaaattatttaaaactttagttatcagtgctgcatcaggtgcagcagcagcttattttttaacaacaaaaaaaggaaaagagctaaggaaaaatgcagaaaaattctatggagaatataaagaaaatccagaagaatatcatcaaatagctaaagataaagcaagtgaatattcaaatttagctgttgatacttttaaagattataaaggtaaatttgaatcaggtgaattgacaacagaggatatcgtctcagccgttaaggaaaaaagcggagaagtagttgactttgctaatgattttgtcaatcaagctaaatcaaaattctcagacgaggatactgctaaaaaagaagataaggctcctgaaacaaaagtagaagatattgtcattgattataaagaaaacacagaagataaagaaaaataaaaaagaagctactataagtagcttcttttttatgagatttttattgtctgagtgaccaaatgaatgaagagactgcagatgtaactgctagacttgccagcatcgctagtaagaaactccagacaggtgttaaacttagtgctagtaataagaaagagattagcacagtggttatactgaagagagcgatacgagcaaaaaagactagctcacgcaacttagcactgtgatcaaattcttgaaatacttgaaattttggttgagcttgctctgttttgctttcgtgagtttgctcttgcttaagtggtgatgacatagctttctcctttgatactagcatatcatatcacaaataatagagtttgtcactagttttttgatactatgagttaaaataaaggttttttctcaaaaaaacaaaaacattgcccatattagtagtagaatactaaaagtattttttactactttccttacttttttaaattggaaaagaaaaaatagatataattttatataatattacaatactatattttttcttatctgatagtgcttaacctctaaagtgatataattttcgaaaagaatatttttatttattcttgtcaagaaatatgcttaaaaatgctgaaagtttgttataatactaattatggaaaaaataattttgacagcgacagctgaatctattgaacaagtaaagcaattgctagcaataggaattgaccgcatctatgtaggggaagaaaattacggtcttcgtttaccacattcattttcagacgatgaattgcgtgaaatcgctaaattagtacatgatgctggtaaagaattgacagtagcttgtaatgcactcatgcatcaagagatgatggataatatcaaaccatttttggagttgatgaaagaaattaatgtggattatttggtagttggtgatgcaggagtattttatatcaacaagcgtgatggttataacttcaaacttatctacgacacttctgtcttcgttacatcaagtcgtcaagttaatttttggggacaacatggagcagtagaaacggttttagcacgtgaaataccttctgaagaactttttaagatgtctgagaatcttgaatttcctgctgagattttagtttatggggcttctgtaattcatcactctaagcgtccgttattgcaaaactattataattttactcatatcactgatgaaaaaacacgtgagcgtggtctttttttagcagaaccaggtgatccagaaagtcactattctatttacgaagataagcatgggactcatatttttattaacaatgatatcaatatgatgactaaagtgactgaactagttgaacatcactttactcactggaaattagatggtatttattgtccaggagataattttgttgctattgctgaaatttttgtcgaaacagctcgtttgattgaaaatggaacattcactcaggatcaggctttcttgtttgatgaacgaattagaaaactgcaccctaaaggacgtggtttagatactggattttatgattttgacccatcaacagtaaaataagatttatttgctacgtgaaagttttctatttcaaagcgtagccaattacactaagaactgcatatcgattggtatgttaattaagatagaaaataattcttttatcttgaaaatagaaggaaatataagatgtctaatgtaaaaaaacgccctgaggttttatcacctgcaggaacactagaaaaattaaaagttgctattgattatggagcagatgctgtatttgttggaggtcaagcgtatggtcttcgaagtagagctggtaacttttctatggaagagttacaagagggaataaactatgctcatgcaagagatgctaaagtttatgtagcggctaatatggttactcatgaaggtaatgagcttggggcaggtccgtggtttcgtgaattacgtgatatgggactagatgcagtcattgtttcagatcctgctcttattgttatttgtgctacagaagcaccaggcttagaaattcatttgtcaactcaagcctcttccacgaactatgaaacttttgaattttggaaagagatggggcttactcgtgtcgtattagcacgtgaggttactatggcagagttggctgaaatcaggaagaggacagatgttgagatagaagcatttgttcatggcgcgatgtgtatttcatactcaggacgatgtgttctatcaaaccatatgagccatcgtgatgctaatcgtggcggttgctctcagtcatgtcgttggaaatatgacctctacgatatgccatttggacaagaacgtcaatcgttaaaaggcgagattccagaacctttctcaatgtcagctgtggatatgtgtatgattgagcatattccagatatgattgaaaatggtgtagatagtttaaaaatagaaggacgtatgaaatccattcattatgtttctacagtaactaattgctataaagctgctgtagatgcctatatggaaagtccagaagcttttgaagctattaaagaagacttgattgatgaactttggaaggttgcacaacgcgaattagcaacaggtttctactaccatacaccaactgaaaatgaacaactctttggagctcgtcgtaaaattcctcaatacaaatttgttggggaagtggtttcatttgacaatgctaaaatggaggctacaattcgtcagcgtaatgttattatggaaggagatcgcgtagaattctatggtcctggcttccgtcactttgaatgttttattgatggtctgcgtgatgctgaaggaaataaaatagaccgtgctccaaatccgatggaattattaaccataacattaccaaatccagtaaaaaaaggggatatgattcgtgcttgtaaagaaggattagtgaacctttatcaaaatgatggtactagcaagactgtaagagcttagatacttttataactattttgtcattttacatggtcaatattactaaaaattgttaaaatagaagaagttcatttaaatagaacaaaaagctataaaaataacgaatagtataagtggaggtataaaatgtcagaatttacatttgaaattgttgagaagttattggtcctatctgaaaatgaaaaaggttggacaaaagagttgaatcgtgtgagcttcaacggagcgccagctaaatttgatttgcgtacatggagtccagatcatacaaaaatgggtaaaggtatcactttatctaatgaagaatttaaagtcattttagatgcttttcgtaaataaataaaaagtggtttcaaaaaccactttttttgtcgagacaaacgagtattcagtaaacatattgattaaaaaaatagaatttttaaactaaaagaattataatggaggtaaaaggaggcctctatgattagacattcatttaaaagtaaggtgttattgttagtctttatcttaacaataatagtgaattatttatccgcaacaggttttttaacagggaacagtcagaagagtctgtctgatcgttatcaaacgctcttgacaccagcaccattagccttttcaatttggtcagtcatctatttattgacctttttagtaatattaagagctatattcagtaagagtcaatcttaccaagataactttgctagcatttttccatactttttgggtcttctattagttaataatatatggactgtattttttacgagtaatttgattggcctatcaacaataataatttttgcttactgtattcttctggttatcattatcaagatactaagtaaaaataaatcaaaattactgcttagaataacatttggaattcatgcaggatggttgctagttgcgtcattggtcaatttagcggtctacttagttaaaattgattttaattacccattaccaaaggtatatatagctatcattgccttgatttttataactgttttaagtctttacctagctagagtattacaaaatgcttacttaatcttatccgttttttgggcttggttgatggtttttaaagcacatttagaaggaaattttcaacacctatattttagtatccaaattttatctttgattgcagcaattatccttggcgtatcgtttttcatcatcggttattataatgtcaaggagaggtacaagcaaaaaaatactagcccttactcacgggttctttgaaagaaatacaaaaagctccatcattatgtactttcctctatcattagatgtatgtctcatgatagaggttcagttcattagtggggcttttttgtattgtattaaagtaaatccatgattaatttcaaattgagtaatgttaaaatgatggcgacaaggtatgctaaataggtattccatttagcattagcatgctctcccataattgatttttgcgacgtgaaataaatcaatggaaagattgaaaatggtaaagctaaggaaagaaaaacttgtgaatagacgattagttgatctaacgtattttcttcgcctccaactagtagggcgataacaaaaattggaagaagagttaataatctagtacaaagccttattaaccattgaggtaatttgaagtgaaggaaaccttccataacgatttgtcctgttaaagtacctgtaatcgttgaattttgaccacttgctagtagggcaactgcaaaaagggtagaaaggaaagaactggctactgcaccagtaatagttttatcagatagggcaagatacatttgagaaaaggcactgatatcattagcatgcccataaaatagactagctcctaagactaatagtagcgaattcacgacaaatgcaagtgatagctgaatgttagaatctaaggtcatgaaacgtacagctttttttattgaagatttattatgataatccacgcgtctagtctgagataaagaagaatgtaaataaagattatgtggcatgactgttgcgccgataatgccaagagcgagggttaaaggactatttttcccttcatgtgatatgttaaaaagctcatggtgtggtaaaaatcctttgaacatagcatctaaatcaggttgtgataaaacaactaaatatgtaaagattatcaaaattgtcaatatgagaacagaaacaaaggcttcaattttttggacgcctaacttcattaagagtaaaagtaagaatacatccaaaatagtaatcatgatagacagtaacaggggccagccaaataataagtgaagagcaatggcagagccaatgacttctgctaaatcagtagcgataagggctaactcaatgataataaatagcaggtaacgaagcggttttgggagtcgagaagctgttgcttgtgctaagtcctgtcgtgtaacaatgccaagcttgccagccatttgttgtaattgcatcgccatcaaagaagatactaaaacaacaaacaatagtaagtaacgataggtagctccaccaataacgctagtaatccagttacctggatccatataaccaactgcaaccaaagctccaggtccaagaaaagctcttaaagtgttccaaaaagagctattgtgaggaacctcaacgctctgattaacttcggataaggatcttttgacggaatgattttgattcatgtaatactatactttctagtaatctcaagccattataacaaatagaaaatagaaaaacaattaaaaattaacgctacttaataatcaattgaggtgctgtttagtatttagagaattattttcttaacagttacatttgaaataacaaaataacagatttctatcgattatttttagttccgtagatttacctaagttatttaagtggagtaaactatatctgtagtgaattttttaagaaatataatccaataatactagcgattcttgtttgattagttcgaaagattgctttatggtatagatatactgtcttgtagagataagaatagatgagctacttaattattattttataataaaaaacacattatttttattgacaaataaaaatgagtttagtaaaataactgtcaaatagaatttcttcggggtcaggtgaaaatcctaaccggcggtatagtccgcgagctttcgagcatgaactggtgtgattccagtaccgacagtaaagtctggatgagagaagaattcagtgattgtctgctacttgcagtttatttgtgctggattaatgagagactccctatagttttctatagggagtctttagtttttttgtgctacctaaaatataatgctaattagtataatcaacgacttctcatccctccccttagttttctattttagaagctaagggtttttattttagaaggaaaaaggaaatgatgaaaaaagaagactacatggcattagccttgaaagaggctgagaaaggtatggggttcgttgctcccaacccattagtaggtgctgttattgttaaagatgatcgtataatttccaaaggttatcataaacgatttggagatttacatgcggaaagacaggctattaaaaatgctgatgaggatatctctggaagtactctgtacgtgactttagaaccatgctgtcatgttggtaagcaaccaccttgtactgaagctcttattaaatctggtatcaaaaaagtagtagttggaagtttagatccaaatcctttagtttcaggaaaagggattgccttgttgagaaaagaaggtttaaatgttgaagttggtatcttaagagaagaatgcgatgctctgaatgaaagatttatttttcacatgacctataagcagccttttgtttatttgaaatatgctatgactttagatgggaagatagctacaaagacgggcgattctaagtggatatcaaatgagcactcaagacaatctgttcagaaattgaggcaaaaatgtagtgctattatggtcggtatcaatactgtattagctgataatccacgtttaacttgccgtattcctaaaggtgaagcgcttgtgaggatcgtatgtgatagtcagttgaagatacctttagactcttacctagttaagagcgctaaaacaataccaacatggattgcaacatgttcagataatcttgctcagcaacaaacattaaaagaaatgggttgccgtttgattaaggtcccaagaaaagatggaaagctggatttgaaagtattaatgactattttaggacaagaagggattgatagccttcttattgaaggaggaagtagtttacatttttcagctttaaaagctggtattgttaacagactaattgtttttattgcacccaaaataataggaggtctgaaagcaaaaacagctatttctggagaaggtttggattggcttaaccaagctttcagagtaaaagatattgaacttagtcgtatggattctgacgttgttattgaaggaaaggtagaacattatgtttacaggaattattgaggaaatgggtcaagtcagtcgtattcggaatggcataaagtcccaacaattaagtattgatgctcccaaactagtccctttattaagaaaaggggatagcgtagctgttaatggtgtttgtttgacggttcttgacaaaagtgaaacagcttttatagcagacgtcatgccagaaagtatgatgcgaacaagcttagctgctttacgacttcattctaaagttaacttagaattagcactcagaagtgactcaaggttaggggggcattttgttcttggacatgtggatggggttggaaaaatagaaaaaatccaaaaagatgatattgctgtcagattttcaattgatgctccacctagtattatgtcttatattatagagaaaggttcggtggctctagatgggattagcttaacagtggtatcatttacagagcattcttttgaagtttcggtcattccccacacgatggctcaaactaatctatccttaaaaaaggttggggatttattaaatatcgaagtggatgttttaggcaaatatgctgagaaatttttagcacccactaatagaactaatcacacttcatcggtaatggattggtcttttttatcagaaaatggctactaagagagaggagaaagctaatggcctttagtccaataaaaaaacttttacaagacatcaaatcagggaaaatggtagtgttgatggatgacgaaaatagagagaatgaaggagaccttatttgtgcggctgaaatggtgacaaaagagtcgattaattttatggctaaatttgggaaaggattaatttgcttacctctgtctaattactatgctgaaaagttagaattagctcaaatggctagccataatactgataatcatgaaacagcttttaccatatctattgatcatctatcaactagtactgggatttctgcggaagatagagctttgacagctaagatggttgctaacgacagtagcaaagctaaagactttagacgtcctgggcacttatttcccttgttagccaaggaaggaggtgttttagctagaaatggacatactgaagcaaccgttgatctatgtcgtttagctggattaaaggaatgtggactttgttgtgaaataatggctgaagatggtagtatgatgagaaaggatgagttattagcatttgctcaaaagcacgatttagctatcgctaccataaaacaattgcaagactatagacgtcaagaagagggaggggtggttagagaaattgagattcagctaccaacgcaattcggtcattttacggcttatggatatagcgaagttgtggcaaataaggaacatgttgcccttgttaaaggggatattagtagtggtgaagatgttttatgtcgtttacactcagaatgtttgacaggtgatgtctttcattccttgagatgtgattgtggggaacaactggctaatgccctccaacaaatagaggctgaaggtcgtggagtccttctttatatgagacaggaaggtcgaggaattggtttgattaataagttaaaagcttatcatttgcaagaagaaggcttagatactttagaagctaatttggctttaggttttgaaggagatgagagagactatggagttagtgctcaacttttaaaagatttaggtataaattctataaacttactaaccaataatccagataaaatccaacaacttgaagcagaaggaatttgcgtcaaaaacagagtgccattacaggtggcagtaacagcttatgaccttaattatttaaaaactaaaaaagaaaaaatgggacatcttttagattaaaggaggaagaaaaaatgacaattattgaaggacaattagtggcaaacgaaatgaaaataggaatcgtagtctcacgtttcaatgaattgattacatctaaattattatcaggagcagtagatggactgctgagacatggtgtttcagaagaagatatagatattgtatgggtacctggtgcttttgaaatcccctatatggctagaaaaatggcattatataaagattatgatgctattatctgtcttggggtagtcattaaaggcagcactgatcattatgattatgtttgtaatgaggtgacaaaaggtattggtcatttaaatagccagtcagatatccctcatatctttggtgttctaacaacggataacatcgaacaagctattgagagggcaggaacaaaagcaggaaataaaggttatgattgtgctctttcggctattgaaatggtgaaccttgataaaaaattgcgtgagcgataaatcagaaacctaacaaagttcagtagaggtaatattaaaacccaccttaaataaggatgggttttaatatattcttatttcattgtagggaaaagtaggacgtctcggatagttgttgtatcagttaacagcatacagagacggtcgataccaatacctagtccaccagtaggtggcataccatattcaagtgcttcaacataatcgtaatcaactccagttgcttcatcatcgccaagttctttagcagatgcttgtgcttcaaagcgagatagctgatcaattgggtcatttaattctgtaaaagcattagcgtattctttagtcatgataaagagttcgaaacggtctgtaaaacgagggtctgtatcatttttcttagcaagtggagacacttcaactggatgaccaaagacaaaagttggttgaattaaagtgtcttcaacaaattcttcgaagaaggcattaatgatgtgaccaactgttgtgaaatgtttttcaagcggaacatttttttcttgtgccaaagcttgtgcttcttcaagagtcatttctttccagaagtcaataccagtgatttctttaaccgcatcaaccatatgaacacgtttgaatggttcattaattttaatttctgtgccttgataattaattggtccatcaccttttacagtttttgtaacatgctggataataccttctgtcaagtccataatatcctggtagtcagcataggcttggtaggcttcaatagatgtgaactctggattgtgggttgcatccatcccttcattacggaaaatacgtccgatttcataaacacgctccataccacctacaataagacgttttagatgcaattcagttgcgatacgaagaaccatgtcaatgtcttgtgcattgtgatgtgtgataaatgggcgagcagaagcaccaccagcttcattatgaagaacaggtgtttcaacctctaagaaaccattgctatccataaagcgacgaatttctgaaatgatttttgagcgtgttacaaaacggtcaaagctgtcacgatttgagattaaatcaagatgacgtttacgatagattgtttcaatatcagttaggccgtggaatttttcaggaagtggacggagtgcttttgaaaggtgagtaatatgagtagccttgatagaaagttctcccatatctgtacgcattacttgcccttcaacaccaaggaagtcacctaaatcagcttttttaaagatttcgtagttttcttcgccaacagaatctttacggacataaatttgaatttgaccttcgcgatcttggatatgcgcaaagccaactttccccttaccgcgcttagtcattaaacgaccagcgattgtagcagtttcttcaatgtcgtgcaagtcttcttttgatttgtcagcgtatttttcatttaattgaccagatgttgctgtacgttcaaatcgtttaccaaaaggatcaatgccttgttcagtcaaagcagccattttttcacgacgaacaatctgttggtcatttaattcttcaatatgttggttagacataatttcctccaagttagtattcatcctattgtaccacaaaaacactgataattcataatttattttatgagtttctggtgttattctcatttttaatagacttttcaccatttgaaaataagggtagaaaaaggtataattaacaattgaaaattcagaaagaaaaggataatcatgattacttcaattgtttttgatgttgatgatacgatttacgatcaacaagcaccttaccgtattgctgtggagaaatgctttcctgattttgatatgagcgctattaaccaagcttatattcgctttcgtcattattcagatattggctttccacgagtaatggctggtgaatggacaacagaatattttcgtttctggcgatgcaaagaaacgcttttagagtttggttatcgtgaaattgacgaagctactggtatttattttcaagaaatatacgaacatgaacttgaaaatattacaatgcttgatgagatgcgtatgacacttgactttttgaaatcaaaaaatgtaccaatgggaattattacaaatggtcctacggaacatcaattgaaaaaagttaaaaaattgggactttatgactatgttgatccaaaacgtgttatagttagtcaagcaactggttttcaaaagcctgaaaaggagatttttaatttagcagcagagcaatttgatatgaacccttcaactacactttatgtgggtgattcatatgataatgatattatgggtgcatttaatggtggttggcattctatgtggttcaaccatagaggacgttctttaaaaccgggaattaaaccagtttatgatgttgctattgataactttgagcaattattcggtgctgttaaagtgttgtttgacttacctgataataaatttatttttgatatcaacgataaaagtaatccagtccttgaaatgggacttaataatggtttaatgatggcagcagagcgtctgcttgagagtaatatgagcgttgacaaagttgttattttactgcgcctaactgcaaaacaagaaaaagtattacgcatgaagtatgctagataattaaataatccactagatgaatctagtggattattttagtgtgtcattttgacctcttgccttaaataagatttatcgttccaagtcagacagttgaagtctttaaaatcatgagtttctatgattgtgaggctggcattatcaagtttatctttgtagtgtaaactaccatattgataacccagtaaggaacgaatagacgcagttaggtttgctccatgtcctacaataaggaccttgtcgtaattttttgaagctagagaacgtaagaaactctctacacgatgcgttgtctgataaagagattctgcaccgaacatgtcatgtttaaattgtaagggattttgataaaatgcggtcatttgacgaggatagatagcttgcatagttgcaattttacaaccttctaaagttcccaatgcccattcacgaagttgaggagtatagtggatttcttttgggcatgaattagcatcattgaggatattaacagtatctctagcacgacctaagtcgctagaataaacagcatcaaaatgaatagatgataggtattgtccaagttcttctaattcttcaatagcttcttcaaggagaggtgagtctccgttagcaccttggaaacgcccctctaaattccattgtgtttttccgtgtctaacaagataaaatttcatatttttctccaatcctaattattattcctttatatcggcaaatttagcatttacgaaatctgcaagaacctcactattaatacgaatagaacgtccaatttctcctgcagagacaatgagttcttgtttttctaaagcgatagtatcgataaaaatagggtaattatgtttttggcgaattccaattggattatttgctccgtgaatataaccggttattttctggagatctttttgaggtatcatttgtacctttttgtttcctgaaattttagctaactttttttcggataaatgctcggtgagaggtaagatacctattatgggaccggttttatcaccgattagcgctaatgtcttaaagatatcttgtttttgaataccgttgggtaaatctccctgtaaagcatccaattgtagactatcatgttcgatttttgctttatctaaaatttgatcaactaaagtttttttgattttattctttttactcataatgacccttaactaataagtttgtttcatatttattataacatttaaagatgattatagtaaatttctactgactcttagaaataagcttgaataccatttcagggaataatgataataaatatcgcaacagtactatttggaatgttaaattagaagttttataaatagctaaatatgaagtgtcctgatgtaatgacttgaaatcataccgtggtcaggtattaaacgattactttgacaaggcatataaaaatttctatactaaatttacaaaatgaaggagagggaactatggaaatactgattgcaggtggtagtggttttttaggaaagcagataataaaagcagcgcttacaaaagggcataaagtggcttacttatcaagacatgaaggtaaaggtgatatatttaaggatcctagattaacctacattaggggagatattacagaagctgataagattcatttagaagacagaacttttgatatattaattgactgtattggagcgattaagcccaatcaactagatgagcttaacgttaaagcaacccaaaaagcagtagcactctgtcacaaaaatcaaataccaaagttagtttatatttcagccaacagcggctattcagcttacattaaaagtaaaaggaaggcagagcagataatcaaagcaagcggtctggattatctttttgtaagaccaggtttgatgtatggtgaagagcgacctctctcgattttccaagccaagtgtataaagttatttagtcatttgcctttcttaggtattgttgtacaaaaggtctttccaactaaggttgtgatagtggcagaagcaatcgttactacgcttaggaaaaaaccaacccaaaaaatcctttctattgaagaattaaataataaatagtttatcaaaaaagctactgttaacagtagcttttactcttttacttttccaaaaagtttctcataagttttcttcttgtctttattaactgcaatttgatttaaatcaagcggttgattgaatcctggtagataaccttgagaggtgtattggtgtaaatcgtatttaagttcagtttgcggagccgcttcatagtatccagaatcgctaccataagttggaatccaaacagcgtcaaatccttttacagagatgccttgctcagtcataaagtaagtaccaatgtagataccaacatttttagcaccaagtctttttaattcttttcggaatgcttggacacctttattcatgttagacattgtctcctcttctacgtcaatccaataaaaagttggtttgtaaggagctgcattcttataaaatatctgagcctcttctttcatttctttaacacttgaaccaagtgcataactgtagacagctactgggatatttcgcttttgaaattctttgatatgggtcttaaacgatttatcgattccagttgtataagcagcgttattagtcttagatatctttgatccaccaaagacacgaataacaacacctgaaatattttttgaaagcgtatcgtaatcaatctccttaggaagttgccaaccagagacatcgataatcggtttaagaacaaactctttatctttcgatgatgttgatttttgcggtacttttgaagcttttacggatggaattgtctttttagcttcaactaattcttttttcaaagtatttgtcgaatgtaaatgaccaataattaataaaagtccaaataaactgaaaaaaaccgcaacaacaataggtttaattcttcttctcattattgatattgtaacttaaaaggtttaaaaaatcaaagtttacaggcttatttacgttcttttaaaaaagaggtcgtttatgtaacattagaaatgaaattgtaataaaaaagacttttaagcggtagtcatagttttgaggtataattaaagacatgataaagaattcaactttaactaaattgactagagtcgctatattatctgctttgtgtgttgtgttgagatatgcttttgcgcctctgcctaacattcagccaattactgccatttttttgattacagttgtcttattcgatttaaaagaaggtgtagctactgtaactataacaatgctagtttcttcttttttaatgggctttgggccatgggtctttttgcaaatcatttccttcactttaattttatgcttgtggaaatttctgatatatccgctgacaaaagctgtatgttttggtaaaataacggaggtagtacttcaaactttctttgcaggagggttaggggttgtttatggcgtcattattgatacctgttttgcttggttatatcatatgccttggtggacttatgtattagcaggacttagttttaatatggcacacgctttatcaacttgtttattttatcctcttttgttaccgattttaaggagatttaggaatgaaaaaatacattaaattattcttgctaacagtattcgctacaactttagtagcttgcgggcaaccatctacatcgaataagacaacaactagctcaacgttagaagttggtaaggttgaattggtggttaaagaagatacgaacgtgttaagtgaaaaggttgtttaccataaaggtgatactgttttggatgtgcttaaagctaactataaagttaaagaaaaagatggtttcattacttcaattgatggcatcagccaagatgaaaccaaagggctttattggatgttcaaggtcaataataaattagctcctaaggcagcaaaccaaattaaagttaaaaagaatgacaaaattgaattttatcaggaagtttacaaaaaataagataaaaacaagttggagatatctccaacttgtttttatgtttttgaaaggctgtagtttagccttgctcaataagattactgtaattaataatttggtctacagtgttagataagaaattaatagtatcgcgcagaggcttatcagtagaaatatcagcactgattaatagagctgtttctaaaggggtacggctcccaccagatttcaagaatgctaaccactcttttgctccgtttggattatttttgagattgagatagccggctgtcgagattactaatccagcagagtaagtatagctatagagccccatgtagtaatgagcttgtctcatccatgtcaaagcggcatcgtcatctatttcaatagcatctccccagaattgtgttaatacttccttcataatagcatttaattgttctgctccaaaagttcctccctcctcaattagagtgtaaactttacgttggaaagcagcttcaagtaagtgagtaatgaaattgtggaagtaagtatcagttaagcgatgtgcaagagcaaagcgtttttgacgtgctgtatcaaattggttttctaagtagtcactaagtaaaagttcgttaaaagtagatggagcttcaacatagtaagtggacatgtgagtattgaaaaaactttggtgattatctgagaagataaattgaccagaatgtccaatctcatgaataagtgtgtagacatcgctcatacgccccgtccagctcatgagtacatagggatgaactttgtaaggatccgcagcatatcctccagaatctttattagcgttagctgcaaaatcaacccaacgctctttttgatagcgctcaacctcttgagaatattcttttcctaaaggagcaactgatttcattactaagtcataagcatcattgatacttacttcgggattaagttcgttatcaatgtctaatttccaatctgcaaaagtcatcttttcaataccattaacatcggcgatatgtttgaggaatcgttgagctactggaccaaattcatccatgataagatcaatttgtctgtcaaacattgaacggtcaacttcttgttcggaaagaagataatcaaaaacactatcgtaaccacgcatatcagcaattaacttttcagatttgacttttgcaagataagccgcagctgcagcattttggtgcttacgtagacctttcgagaatgaacggaaggatttttcacgtatctctgcattttcgtgattttgaaagtaattttcataagttacaaaactatttttgtaggtttttccgtcaacttcaaaatcttccatatcaaaatcgccagcacgcattttagtataaatatcatatggtgtatttaggacttcatttaagtttgtcaaagctttttcgacttctggacttaataagtgttgcttttgaattttagcttggcgaatagttgctttgaaatgagggttattttctaaagaatctaaaatctttatatctgcatttgctagggcagtattaaagaaagaaagtagtacattagctttagttgcgaagtctgatcctgcttgagaaatttgtgcaaactcttcgttgctaaagtcagtagtttgaggcataaaagcatacgtatcaatgtgactcatctggatataaatatgctcgatttccataagggcactagtaaaatcctcaacacaattaagttttccctcgtaattttttttgaaaaccttgatatcctcaagagctttttcaatagccagtaaaaaatcttgacgatctttgtagagagcagtcagatcccaaagttcattttcagggaattcagagcgttttttaagtttcatgcgatactcctttaataatagttgttaattaacaattaatcagttaatctcaattatcctcagtatatcaaaaaagtcgaacaagaaaaactgattactgtcataaataagtaaaaatctgaaaattctatctaaaaatcctagaatggtttactttttactttaaaatggtatcatagtagtgagatttaagagaggaagtgatggtttgtcccacccgaaattagaaagtagtagcaataaagaaatcattaccgaagaggtcggtttactgaagcagcttttggatgaagcaacgcaaaaattgattggtagtgaatcatttgacaagattgaaaaaatagtttcattatcattaactgacgattatactggtctgaaggaaactatttcggctttaagcaacgaggagatggttattgtttctcgttacttctctattttgccgctcttaattaatatttcagaagacgttgatttagcatatgaaattaattataaaaataatcttaaccaagattacctaggaaagttatcaacgactattgatgttgtagctggccatgaaaatgctaaagatattcttgaacacgtcaatgttgtgcctgtgctaacagctcatcctactcaggtgcagcgtaaaacggtgctcgaattaacgtctaagattcatgatttattacgtaaatacagagatgtcaaggcaggaatcgtgaatcaagaaaaatggtatgctgacttgcgtcgttacatcggcattatcatgcaaacagacactattcgcgagaaaaaattgaaagtcaaaaatgagataaccaatgtaatggaatattacaaccgttctcttattaaagcagttaccaaattaacagcagaatataaggcactggcagctaaaaaaggtattcacttggagaatcctaagcctctgactatggggatgtggattggtggtgatagagatggcaatccctttgtaactgctgagacactaagattatcagctatggtacaaagtgaagtgattattaaccattatattgagcagctaaatgaactttatcgtaatatgtcactttcaataaatctaactgaagtctctcccgaacttgttacattggcaaaccagtcacaagataattcggtatatagggaaaatgaaccttaccgtaaagctttcaattttatccaagataaactggtacaaaccctactaaatttaaaagttggttcttccccaaaagagaaatttgttagtcgccaagaatcttctgatattgtaggaaggtatataaaatcacatatcgctcaagtagcttctgacatacagacagaagaactaccagcatacgctactgctgaggagtttaaacaagatttgttacttgtgaagcaatctttagttcaatatggacaagattctcttgttgatggcgaattagcttgtcttattcaagcagtagatatctttggattttatttagctactattgatatgcgtcaagattctagtattaatgaagcttgtgtagcagaattattgaagtctgccaatattgtagatgattacagttctctttcagaagaagaaaaatgtcaacttctcttaaaagaattaacagaagatcctagaacattatcttctacgcatgctcctaaatccgagttacttcaaaaagaattggctattttccaaacagcacgtgagttaaaagatcaattgggtgaagacattataaaccagcatatcatttctcacacagagagcgtttcggatatgtttgagttagctatcatgttaaaagaagttggactaattgatgccaatcaagctcgtattcagattgtaccgttatttgaaaccatcgaagatttggataattcacgtgatattatgacccagtatctacattatgaattagttaaaaaatggattgctactaacaacaattatcaagaaataatgctaggttattcagatagtaataaagatggtggctatttatcatctggttggactctatataaagctcaaaatgagctaacaaaaataggtgaagaaaacggtattaaaatcacatttttccacggtcgtggtggaactgttggtcgtggtggtggtccatcttatgaagctatcacatcacaaccttttggttcaatcaaagatcgaattcgcctaacagagcaaggtgaaatcattgagaataaatatggtaatcaagatgcagcctattataaccttgaaatgcttatttcagcttccatagaccgcatggtaacacgtatgattactaaccctaatgaaattgataatttccgtgagacaatggatggtattgtgtctgaaagtaatgccgtttatagaaatttagtttttgataatccttatttctatgactatttctttgaagcaagtccaattaaagaggtatcaagtttaaatattggttctcggccagcagcacgtaaaacaattacagaaatttcaggtttacgtgcaattccatgggtattttcatggtcacaaaatcgtattatgtttccaggatggtatggtgttggatcagccttcaagcactttattgaacaagatgaggcaaacttagcaaaattacaaaccatgtatcaaaaatggccattctttaattctcttttatctaatgtagatatggttttatcaaaatcaaatatgaatattgcgcttcagtatgctcagttagctggaagtaaagaagttcgagatgtttttaatatcatccttaatgaatggcagttaactaaagatatgattttagctattgaacagcatgataatttattagaagaaaacccaatgttacatgcaagtttagattatcgtttgccatatttcaatgttttgaattatgttcaaattgaattgattaaacgtcttcgtagtaaccaactagatgaagactatgagaagttgattcatattactattaatggtattgcaacaggtttacgaaattcaggttaatattgatagagggaggatcattgctattctcacgccaaacgcatgaagaaacttttgttttcagaaaactagattcataatgacaaaatcaatcaaagtagtacactatagatgaggtgactacgatgattgattttattatttctattgatgattgcgcagttgaattggatagtcgtcaatcttggaaaattcgctaccccttatcaaccattctatttcttgtctttgtttgtcagttagctggcattgaaacctggaaggagatggaagattttattgaaatgaatgaaccattgtttgcgacctacgttgatttgagtgaaggttgtccgtctcatgataccttagagcgtgtgattagtcttgttaattcagaccgtttaaaagagcttaaagttcaatttgagcaatcattgacaagcttagatgccgttcatcaactgatttcagtggacggtaaaacgattcgaggcaatcgaggtaaaaatcagaagcctgttcatattgtaacggcttatgatgggggtcatcatcttagtttgggacaggtagcggttgaggagaaaagtaatgaaattgttgccattcctcagttattgcggacaattgatatccgtaaaagcattgtaacgatagacgcaatgggcacgcagacggctatcgttgatacgattataaaaggtaaagcagactattgcttagccgtcaaaggaaatcaagaaacactttatgatgatattgctctttattttagtgatgtcaacttattggaagaactccaagaaaatgcgcagtattatcagactgttgaaaaatctaggggacagattgaagttagagaatactgggtgtcttccgatatcaaatggttgtgtcaaaatcatcccaaatggcataagttacgtggtattgggatgactcgtaacacgattgataaggatggtcagctgagtcaagagaatcgttattttatctttagctttaagccggatgtcctcacatttgccaattgtgtacgaggtcattggcagatagagagtatgcactggttattggacgttgtttatcatgaagatcatcatcagacattggataaaagagccgcatttaacctaaatcttatccgaaaaatgtgcttatattttctcaaagtgatggtatttcctaaaaaagacctcagttatcgtcgcaaacaacggtatatttctgtccatttggaagattatttagtccaattatttggagaaagaggctaagcagatcattgatttaaaaaggaatcttttcaaaattgatgtccgggcacaaaaggatgaagagaaagttttcatgcgtacggcgtgttgctattctcccttttactttacttcgaaagatgatataatgcataatggtaattttttgatatattaaaggaaataatacaatatgaaaattgataaaaggcatcttctgaattattccatcctcattccctatttgatattgtctattctaggcttaattgtaatttattcgacaactagtgcaactctaattcagcttggagctaacccttttcgttcagtaatcaaccagggtgtcttttgggcagtcagtttggttgcaattatctttatctataaactgaaactaaattttttgaaaaattctaaagtgttgactatggcagtattggtagaagtatttttactactaatagcgcgcttttttacacaagaagttaatggagcacatggttggattgttattggtcctattagttttcaacctgctgaatatttaaaagttatcattgtatggtatttagcgtttacttttgctcgaaggcaaaaaaagatagaaatatatgattatcaagctttgacaaaagggagatggcttccgagatcactaagcgacctaaaagattggcgattttattctttatttatgattggtttggtaattgcacaacctgatttaggaaatggttcgataattgttctaacggtcattattatgtactgtattagtggtattggttatcgatggttttcagctttacttggtctaatcgtcgtggggtcaactttatttatcggaactattgcagttgttggagttgagacaatggctaaagtccctgtctttggttatgtagctaagcgatttaatgctttttttgacccatttaaagatttaacagattcaggacaccagttggctaattcgtattatgcaatgagcaacggtggctggtttggtcgaggacttgggaattctattgaaaaattagggtacttaccagaagcaacaacagactttgtcttttcaattgttattgaggaattaggagttattggtgcagggtttattttagctttggttttcttcttaattttacgtattatgcacgtaggtataaaggctaaagatcctttcaactcaatgatcgctcttggtattggagcaatgctattgatgcaagtttttgttaacattggtggtatttctgggttaatcccctcaactggagtgacatttcctttcttatcccaaggagggaacagcctcttggtactttctgtagcgatcggattcgtgcttaatattgatgctaacgagaaaaaggaactcataatgaaagaagcagaagagcaatataagccacaagaaaaaaatgaaaaaataatcaaccttgatgcctttaaataatcatccaaacaaaaatcgagatttttatctcgatttttgtattttttgaaatttaaactctaattaatagagagaagatatttgaagaaaagaagtgtctattaatattctaatactataaattaggatgtatttaacaatatgattatatgataactactaaaaaatacatataagagataacaaatgcctcaatcaatcttacccgaattttaaggaaataaagaaataagcaaaaaagcataaaatacttgcttttttagaggattttgttaaaatagataagtaaagttagactgtattgcctaccgtctatctataaaatatattttattggaggcttttcctaaaatggcaaaagaaaaatacgatcgtagtaaaccacacgttaacattggtacaatcggacacgttgaccacggtaaaactactttaacagcagctatcacaactgtattggcacgtcgcttgcctacttcagttaaccaaccaaaagattacgcttctatcgatgctgctccagaagagcgcgaacgcggaatcacaatcaacactgcacacgttgagtacgaaactgaaaaacgtcactatgcccacatcgacgctccaggacacgcggactacgttaaaaacatgatcactggtgctgctcaaatggacggagctatccttgtagttgcttcaactgatggaccaatgccacaaactcgtgagcacatccttctttcacgtcaagttggtgttaaacaccttatcgtattcatgaacaaagttgaccttgttgatgatgaagaattgcttgaattggttgaaatggaaattcgtgaccttctttcagaatacgacttcccaggtgatgaccttccagttatccaaggttcagctcttaaagcacttgaaggcgacgaaaaatacgaagacatcatcatggaattgatgagcactgttgatgagtacattccagaaccagaacgtgatactgacaaacctttacttcttccagttgaagatgtattctcaatcactggacgtggtacagttgcttcaggacgtatcgaccgtggtactgttcgtgtcaacgacgaagttgaaatcgttggtattaaagaagatatccaaaaagcagttgttactggtgttgaaatgttccgtaaacaacttgacgaaggtcttgcaggggacaacgttggtgttcttcttcgtggtgttcaacgtgatgaaatcgaacgtggtcaagttcttgctaaaccaggttcaatcaacccacacactagatttaaaggtgaagtttacatcctttctaaagaagaaggtggacgtcatactccattcttcaacaactaccgtccacaattctacttccgtacaactgacgtaacaggttcaatcgaacttccagcaggaacagaaatggttatgcctggtgataacgttactatcgaagttgaattgattcacccaatcgccgtagaacaaggtactactttctcaatccgtgaaggtggacgtactgttggttcaggtatcgtttcagaaatcgaagcttaatttaacttaattaagttcccaaacggcagttagagtcagacagctcaaattgtgaagagtcctcagggactcttttttagtatctataattaaagcgttttactagactcgtgaaacttttaattaactataatttatggtatgatagattagtaaataaaaaaagaagaggtatgtgtaatgtcacgtaaaccatttatcgctggtaactggaaaatgaataaaaatccagaagaagcaaaagcattcatcgaagcagtagcttctaaattaccatcatcagaacttgttgaagcagggattgctgctccagcgcttactttatcaacagttcttgaagcagctaaaggttcagaattgaaaatcgctgctcaaaatagctattttgagaattcaggtgcattcactggtgaaaacagccctaaagtattggctgaaatgggtacagactacgttgttatcggtcactcagaacgtcgtgattatttccatgaaactgaccaagatatcaacaaaaaagcaaaagctatctttgctaatggtttgactccaatcatttgttgcggtgagtctcttgaaacttacgaagctggtaaagcggttgaattcgtaggtgctcaagtttcagcagctcttgcaggtttgtcagaagagcaagtatcatcacttgttatcgcttacgaaccaatctgggctattggtactggtaaatcagcaactcaagacgacgcacaaaacatgtgtaaagcagttcgtgacgttgttgcagcagacttcggtcaagcagttgctgacaaagttcgcgttcaatacggtggttcagttaaacctgaaaacgttgcagaatatatggcttgcccagacgttgacggtgcccttgtaggtggagcttcacttgaagcagaaagcttccttgccttattagattttgttaaataaatcacatgatatctaaaggcatagcactctaggtgatatgccttttcttatagatagttaataataagctatttttgattattgaactagtaatcagactagatttttatggctattttttgtagaatagttaaagtaaatattggtatagccaaaattaaaggagaaattttctaatggtaaaattagtattcgcacgccacggtgaatctgagtggaataaagctaaccttttcactggatgggctgacgtagatctttcagaaaaaggtacacaacaagctattgatgctgggaaattaattcaagcagcaggtattgagttcgaccttgcttttacatcagttcttaaacgtgccatcaaaacaactaaccttgcccttgaagcagctgatcaactttgggtaccagttgaaaaatcatggcgcttgaacgaacgtcattacggtggattgacaggaaaaaataaagcagaagcagctgaacaatttggtgatgagcaagttcatatttggcgtcgttcatatgatgtattgcctccagatatggctaaagatgatgaacattcagcacatactgatcgtcgctatgcttcactagatgattctgttattccagatgcagaaaacctaaaagttactttagagcgtgctcttcctttctgggaagataaaattgctcctgctcttaaagatggtaaaaatgtgtttgttggtgcacacggtaactcaatccgtgctcttgtaaaacatatcaaacaattgtcagatgatgaaatcatggacgttgaaattcctaacttcccaccacttgttttcgaatttgatgaaaaattaaaccttgtttcagaatattacttaggtaaataatctaatctttatataaaaaattcaggccaagttggcttgaattttttattatttataacattttgagtgtctgtaaaaaaccatttttatgatacaatagtagtcagagtttttatagcaaggagttaatgttgaatcgtaaaaaaaggtatcgtctcactgtaaaaaagcaaaatgctagcatacctagacgattaaatcttctattttttattattgttttattatttactgttctaattcttcgtttagagcaaatgcagattgggcaacaatcattttacatgaaaaaactgacagctcttacgagttatacagtgaaagaatcaaaagcgagaggtcagatttttgatgctaagggagttgtcttagttgaaaatgatgaacgtcctactgtggcgttttctagaggaaacaatatttcatctcagtctatcaaagagttagcgaataaattatcacattacattaccttaaccgaagttgcttcaagcgatagagcaaagagagattattatttagcagataaagccaactacaaaaaagttgttgaaagtttaccagattctaaacgttacgataaatttggtaaccatctagccgaatcaaccgtatatgcaaatgcagttgctgcagttccagtgagcgctattaactattctgaagatgagttaaaagtggttgccttatttaaccaaatgaatgcgacaccaacgtttggttcagtgaaattaagtacaggcgaattaagtgatgatcaaatcaagaaactggatgctgataagaaggaactgttaggaatttctgtaacaagtaattggcatcgtcgtaaaaaaggaacttctttatcggatatattaggtactatttctacagaaaaggcaggtttaccaagagaagaagttaaaaaatatttgaaaaaaggctattcactgaatgaccgagtgggaacttcttaccttgaaaaacaatatgaagatgacttacaaggaatcagacaaattcgcaaagtagttgttaataaaaaaggtaaagttgtttcagataatattacgcaagaaggtaagtcaggaagaaatcttaaattaacgattgatcttaattaccaaaacaaagtagaaagtatcttgaaacaatactatggcagtgaattatctagtggacgcgctagtttttccgaagggatgtatgcagttgctatagaaccttcaactggtaaagtgttagcaatggctggtctgaaaaatgatcatgggaatttagttgatgacagcctaggcactattgctaagaatttcacgccaggatctgttgtgaaaggtgcgacgctatcatcaggatgggaaaataaagttcttagaggaaatgaagtgctttatgaccaagaaattgctaatatacggtcatggtttacacgaggtttgactccaatatctgcggcacaagcgctagagtattcatctaatacttatatggttcaagtagcacttcgtttaatgggacaagactataatacaggagatgctttaactgatcgaggctatcaagaagcaatggctaaactaaggaaaacttacggcgaatatggtttaggggtttctacaggattagatttacctgaatcagaaggttatgtacctggaaaatacagcttaggaacaactctaatggaatcgttcggtcagtatgatgcctatacaccaatgcaacttggtcagtatatctcaactattgcgaataatgggaatcgtttagcacctcacgtggtttcagatatctatgaagggaatgattctaataagttcgctcaattggttcgttcaatcactcctaaaacactaaataagatagctatctcagatcaagagttagccattattcaagaaggtttttataacgttgtcaatagtggaagtggctatgcaactggtacgtcaatgagggggaatgtgacaaccattagtggtaaaactggtaccgctgaaacatttgctaaaaatgtaaatggacaaacagtttctacctacaacttaaacgctattgcctacgatactaatcgtaaaatagcagtagcggtaatgtatccgcatgttacaactgatacaacaaaatcccatcaattagttgcacgagatatgattgatcaatatatttcacagttcacaggacaataagagaggacatttgaatgctttacccaacaccaattgctaaattgattgacagcttttcaaaattaccgggtataggtactaaaacagcaacacgtttagctttttacaccattggtatgagtgatgaagatgttaatgaatttgctaagaatttattagctgctaagcgggaattaacctattgttctgtttgtggtaatttgactgatgatgatccttgcttaatttgtacagataagacgcgtgaccagtctgttatcttggttgttgaagatagtaaagatgtgtcagctatggaaaaaattcaagagtataatggtttgtatcatgtcttacatggcttaatttcacctatgaatggtattagccctgatgacattaatttgaaaagtttaattactcgattgatggatggtcaggtgacagaagttattgttgctaccaatgcgactgctgatggtgaagctacatcaatgtatatttcacgagtcttaaaaccagctggtatcaaagtgacacgattagcgagaggtttagctgttggttcagatatcgaatatgcagatgaagtaaccttgcttcgagcaatcgaaaatcgtacagagttataattgttataaagaaaaggttgggaatctcctaactttttcttttacaatactaactttaagtggattgatttttgaaagttaggttaaaatatggtattattaaaaggtcaatcttagattagatagaaaagagaagaaatatgtcaaaagaaacattgatcttgctttacggtggtcgctctgcggaacgtgaagtatctgtactgtctgcagaaagcgtcatgcgtgctattaattatgataaattttttgttaaaacttattttatcacgcaagtaggtcaatttattaaaacacaagaatttgatgaaatgccatcttcagatgaaaagttaatgacaaaccaaactgttgatttagacaaaatggttcgtccaagtgatatctatgatgataatgcaattgttttccccgttttacatggaccaatgggggaagatggttctatccaaggatttttagaagttttaaggatgccttatgttgggactaatattctatcttcaagcgtggctatggataaaattacaacaaaacaagtccttgcaacagtaggtgtacctcaggttgcatatcaaacttattttgagggtgatgatttggaacatgcgattaaactctctttagaaactttaagtttcccaatttttgtaaaaccggctaatatggggtcatcagtaggtatttcaaaagcgacagatgaatcctcacttcgctctgcaattgacttagctctcaagtatgatagccgtattttgattgaacaaggcgtgacagctcgtgaaattgaagtaggtattttaggcaataatgatgttaagacaacttttcctggcgaagtcgttaaagacgtcgatttctatgactatgacgccaaatatattgataataaaattactatggatattccagctaaagttgatgaagcaactatggaagcaatgcgtcaatatgcaagtaaagcttttaaagcaatcggggcttgtggtttatcacgctgtgatttctttttgacgaaagatggacaaatcttcttaaacgaactgaatacaatgcccggttttactcagtggtcaatgtatcccctgctttgggaaaatatggggctaacttatagtgatttgattgaaaagttagttatgttagctaaagaaatgtttgaaaaacgtgagagtcatttaatttaaaaaagttcaactaagtctttcttagttgagctttttcaaatctatgatatgttatgaaagtgtgttataatttaggagtatattcgtttataagggatagcatactatctacaacattgttgctaaataatagaaaaggaaatgatatgaagcttagtttgcatgaagttgctaaagtagttggcgctaaaaatcaagtatcagagtttgaagacgttcccctgggaaatattgaatttgatagtcgtaatatcagtgaaggtgacttatttcttcccttaaaaggagcaagagatggacatgagtttatagagatggcttttgataatggagcaatagcaaccatttcagagaaggaaatagagggtcatccttatcttttagtgtctgatgcacttaaagcatttcaagtcttggcacagtattatattgaaaagatgaacgttgatgttattgcagtaactggctcaaatggtaagacaacaactaaagatatgatagctgcaatcttatcaaccacatataagacttataaaacacaaggaaactacaataacgagattggcttaccctatactgtgctacacatgccagaagatactgaaaaaattattttggagatgggacaggatcatcttggagatatccatgtgttatctgaaattgcaaaaccacgtattgctgttgttactttgattggtgaagcacacttagaattttttggtagtcgagaaaagattgcagaagggaaaatgcaaatcacagatggtatgagttcagatggcatattaattgcaccgggagatccaattattgatccatatcttccagcaaaccagatgactattcgttttggtcatgaccaagaattgcaagtgacagaactcaaagaagaaaaacattccttaacttttaaaactaatgctttggagcaccaattacgtataccagtacctggtaagtacaatgcaactaatgcgatggtcgctgcctatgttggaaaattattagcagtagcagaagaagatatagtggatgctctagaaaatcttcaactaactcgtaatcgcaccgaatggaagaaatcagccaatggagcagatattttatcagatgtttacaatgctaacccaacggctatgcgattgatactagaaaccttttcagctattcccaataatgatggtggaaagaagattgctcttttagctgatatgaaagaactgggagaacaatctgtggatttacataatcaaatgattatgagtatcagacctgactctattgatactttgatttgttatggccaggatattgaggggttggctcaattagcaagccagatgttcccaattggtaaagtgtatttctttaaaaagaatcaagaagtagatcagtttgatcaattgcttgcaaaagtaaaagatactcttaaggagaaagatcaaatattattaaaaggttctaactcaatgaatctttctaaaatagttgatattcttgaagtaggataatagaggtgttagggtaacaagttaccctaacttttttgttttttaatcacgaataatattcagttttattgaggaaaatagatatgctaagcagaaaactggtgatatattcagttttttgataatctgtttattacgaactatatttttaaaaataaaacttaagttcgtttttaggaggattgtttgaaaaatttaaatcgttatgtagttgcggtttctggagtcgttttacatttaatgctaggatcaacttatgcttggagtgtgtttcgtaacccaatcatctcagagactggttgggatatttcatcagtttcattcgcttttagtttggctattttttgtctaggaatgtctgcagcttttatgggacacttagtagagcgttttggtcctaggataatgggaatgatttctgctattttatatggagcagggaatgtgttaacaggtttagccattgaaactcagcagttatggttactgtatgttgcatacggtattttaggaggaatcggacttggttcaggttatattactccagtatcgactattattaaatggtttcctgataggaggggactagcaacaggattcgctattatgggatttggctttgcttctttagtaacaagtccgcttgcacaatccttaatgattaggattggtgtaggtaaaacattttatattttgggattagtatatttttttgtcatgatgattgcctcacaatttattaaacaaccacctcaggaaaaaataactattttgactcacgacggtaaaaagaatgctatgaattcacaaattattactggattaaaagcaaatgctgctataaaatcaaaaaccttttacatcatttggttgactttgtttattaatatttcgtgtggcttaggtttaatatcagcagcttcaccaatggcacaagatttagcaggctattccgcagaatctgcagccttattagtaggggtactagggatatttaacggttttggacgtctgttatgggcaagtctctctgactacattggacgcccgttgacctttataatattatttattgtgaactttattatgacttctagtttatttttgtcattcaatgctattgtatttgcaatagcaatgtctattttaatgacttgttatggtgcaggcttttccttattacctgcttatctaagtgatatttttggaacaaaggaattagctactttacatggttatagtttaacagcatgggcaatagcaggtctgtttgggcccctattgttatcaaagacatattcatggggaaattcctatcaattgacattaatggtttttggttttttattcttattcggattattgttatctctatatttaagaaaattaacaactaaagttgtgtagtatatatctaatttaaaattctttggttttaccaaagagttttttctttgaaaaatagttttgtcttatagcaaataatttgatatactaagtatctagtaaaaaaatgatagaaagataatactaaaatgatagaattcttttctaatatcagaacagagattccgcagatgcctttacttatccatagtttgattttatctgtcttaccttttctgatgtggctgactttggttaatagagataagcctttgtataaaactatttggagtatccttttaggacttcagttaattacgatttatacttggtttttctgggcaaaattgcctttatctgaaagtcttcccctttaccattgtcgaataggcatgtttgtcgttctcttggcgaggcctggaatattaaaggattatttcgcattgttaggagtagtaggtggagtattggcaatgattcacccagacttttacccttaccagtttctacatgtgactaatattttcttctttattggacattttgctttatttgtccttagtttactacatctgatgacacagtccaatttggacaaattaaatccaaaattgattatacaactaacgcttctcattaatatgtctttgatttttattaacctcttgactggggggaattatggctttatgatgaagacaccaatactaggaataacaaatccctttttaaacctttttatagtgacaactctattaagttttctcgtcctatttgttaaacaaattttccaaaaagtgagaatgagagctagtcttaaaacagaagaatcttaattattttaatattattatattatctagctattaaaaaataaatagctggataatgtttttcatttttagctatttttatgattgaccgctaattattaatctgctaagatatagtacgtaataaaaacttaaccggttaattatttttgaaatatattttttctggaggaaaatagtaatgaataaatcattcaataccaaattaggtttggtaactgtagcggtattatcaggtattgtattaacgtctcaattacctgtgaacgctaaagctgagacaccagtaatggcagcaagtgcacaacaaggtttccgttttgtagcaaccgttgtagatagtcagacgcatgtcttgccgggaaaattggtaactttgtcagaggtgacaagtggtcagcctaaaattattgcaagtgtgaaaacgaatgatgccggacaagctatttttaataatctccctataaaacgtaaccttagtgtgtctgttgatggacaagtaaaaggatatactattcgaactgacgtagcaggttctagtaaagcagctagttttacagcaacaggagtagggacaaatgagccaacgtattcaaaaaaaaccatagacatcacagtgagagaccagaatgctgaacctgtttcaggcaggacagttaccttaaaaacacaagctggtcgtgagattgctagcttggtttctggtgacaatggattaactcgctttactgatcgtttactagatggaacattctaccaatattttgttgatgggaaaaaaattggtgatattgtacctggagaatcaagaagtgcatatgttaatgttgcacctaaaaaagattattttacctttacagtcactgctttagataaagatggacttgttgttaagggaaaagaagtaacgttgactgatattactgatggtaaagcagtagcgcttgcttctttaaaaacgaatgataatggacaagctatctttaccaacctaccattatcaagaaatatcagtgtttcaattgatggaaaatcaaagggctatactcttcgaactgatgtagcaggctctcataaagcggctgcattctatgtagatggtaaaggtaccaaagcacctcaatttagtgcagaagcagcggttgtaactgtttacgatgctaatggaaatactatagcaaaccaagaagtgacattaactaattcaaatgggacaattgttgcaaaaggtttgactgaaaaagatggcaaagcaaggttcgccaataaattaatggcaggaacgttatacaatatttttgtaaatggtattgagatgcctaaaactgcccttgttggtagtgatgtcagtgtttttctaacagataaacaaattaagaaagaaaaacctgttactcctgataaattggataaagaaatgaaccaagagaaggaaaaggagctcttagatactccaaaaccagtaccacctacttcgaaaccaacagcaccaattaaaaataaaaaggacgattcccctaagaagttcacgaaaagtcaatcttctagtttgaagtcaagtgttaaggctataggtgctaagccaaaagctatgacagccttagctaaaaaattgcctaaaactggtgatcaagccattagtattttaactttggttggttttattgtaacagggttagcgattatgttaggcttccttaaaaaatcacgatcaaaataatttattttagaagcttgggtctttagacacaggcttctcttctttcttcggaaatagattgaacttgaagaatgttgttaaattcgctataataataaagttatagacaagattattgtttcagttgagactactgaaaataatactaagaaatggataaaagctaaggattgaatatgacattacaagacgaaatcaaaaaacgccgtacttttgccatcatctctcacccggatgctggtaagacgactattactgagcaattattatattttggtggtgaaattagagaagcagggacagtaaaagggaaaaaatcaggtacttttgcaaagtccgactggatggatattgaaaagcaacggggtatctctgttacttcatctgttatgcaatttgattacgcgggtaaacgtgttaatattttggatacacctggacatgaggatttctcggaagatacataccggaccttaatggctgtggatgcagctgtcatggttgtagattcggctaaaggtattgaggctcaaactaaaaaactttttgaagttgttaagcatcgtaatattccggtttttacgtttattaataaattggaccgtgatggacgtgagccattggatttgcttgaagagttagaagaagtactaggtattgcttcttatccaatgaattggccgattggtatggggaaatcatttgaagggctttatgatttacataataaacgtttagaactctataagggagacgagcgttttgcaagtattgaagacggtgatcagctgtttgccaataatccattttatgaacaagtcaaagaagatattgaacttcttcaagaagcaggtaatgacttttcagaacaagctattcttgatggtgacctaactccagtattctttggctctgcccttacgaactttggagttcagacttttcttgatactttcttggagtttgctccagaacctcatggtcacaagactacagaaggtaatgttattgaccccttggctaaagatttttcaggttttgtctttaaaattcaagctaacatggacccacgtcatcgcgaccgtattgcttttgttcgtattgtttctggtgaatttgagcgcggtatgggagttaatttgacacgtactggtaaaggtgctaagctctccaatgttactcaatttatggcagaatcacgtgaaaatgtgacgaatgctgttgctggggatattatcggggtttatgatacaggaacttatcaagttggggataccttaacagttgggaaaaataaatttgaatttgaaccattaccaacttttaccccagaattatttatgaaagtatcagcaaaaaatgttatgaagcagaaatcattccacaaaggtattgagcaattagtacaagaaggagcaatccagctttataagaattatcagacaggcgaatacatgctgggtgctgtgggtcaacttcagtttgaagtttttaaacatcgtatggaaggtgaatacaatgctgaagttgttatgacaccaatgggtaaaaagactgtacgttggattaactcagacgatttagacgaacgcatgtcttcaagccgaaatattttagcaaaagatcgttttgaccaaccagttttcctatttgaaaatgattttgcacttcgctggtttgctgataagtatcctgatgtgaagcttgaagaaaaaatgtaaaatttaaagtcactcaaatttgagtgactttttaagttttttagactaaaatagttataatacatagaaaagattggagattaacatgggaattttttcgggattaatgggaaatgcttcacaaatggataccgataaagtcgagaatcagttatctgatattctgatttcagatgaacaggttgatttagcttataccttaattcgtgatttgattgtttttactaattatcgtttaattttagtcgataaacagggggtgacaggtaaaaaggtttcttataattctataccttatgcttctatatcacgttttacagtggaaactagtggtcattttgatttagatgctgagttaaagatttggatatcatcagcaatagaaccagcagaagtacttcagtttaagaacgaccgtaacatagtgagtatacagaaagctttggcgacagctgttttaaaataaacaatttagcagtagtgatttttatcactgcttttattttgaagtatagtaggcctcaagcatatattttgaaaacgctgtatttttttgataagatatttttttgaggagtattaaataatgataatagaattaaagagtgttggaaaaatttttccaaaatcacagtttagattagatgatatttcttttaatatagaagaaggcgagatagttggtctgattggttctaatggtactggaaagagtactattttgaagatgattaatggcttaatcccttatgataaaggaaatatttattatcaaggaaaagaagtgaagtctttttctgataataagttacgtcagatgcgtaaagatattgcttatatttttcaaaatcataatttgttagcaggagaaagtgtatattatcatctagctttagtttataaattaaatcatcaaaaagtaaatcatgacgcaattaatgatatcttagattttttaggtttgatggatttaaaacaggtgaaatgccatagtttgagtggtgggcagcaacaaaaagttgcaatcgctatggctgttttgcaaaaaccgaaacttattctatgtgatgagatcagctctgccttagatactaatagtgaaaaagagatatttaacttgttgtctgatcttcgtgaaaaatatggtatctctatcttgatgattgctcatcacctatctcttttaaaacaatattgtgatcgtgtaatgattttggatcaccagactattgtagatactgttgttccagtgaaagcaactctgaatcaattaaagtcaaactacgtagatcaagtaaaggagtttttgttacatgattgacattattgaaaaacatggcgaaggtatcttaaaatcattttgggaaaccaatttaatgttagggttaaccttgattctttgttttctaattgcttttccaacaggtattttattgttttcattgagaaagtcttacttgattaaacattctttagcctatcaactactaaatttatttttaggtacgttacggagtgtccctttccttatttttatttttatcttaatccctctcaatcgattaatttttgggacctcatttggaacgatagcggcaatcttacctcttactttggtttcagtcagtttgtatgcacgttatgtggaacaagctttattaaatatacctcaagttgttgtagatcgagctctcagtctaggggctaacaagagacagataatttattattttttaatcccctccatcaagattgaccttgttttatcatttactgcaacggctataagtattcttggctactcgacaataatgggagttattggtgcaggaggtttgggtgaatatgcctatcgttttggctatcaagagtatgactacccagttatgtacttgattgttgtcttatttataatatatgtgtttatcttacagagtttgggctattttatagcaaaccgctactcaagaaaataaaagaaaagaggaactatgaaaaaattactttccctaacatgtctaatcatgatgtctttatgtttagtggcatgtactaagcaagcaatgtcgtctaagaaaattaaagataagaatagtaaagaaaaggtgattactgttgcaacttacagcaaacctacatctacctttttagatttggttaaagataatgtaaaagaaaaaggatatactttaaaggttgtcatggtctctgactatattcaggctaacattgctttagaaaacaaagaacatgatgctaaccttttacaacatgaatttttcatgagtatctttaataaggaaaatgatggtcatctagtatcaattacaccaatttatcattcattggctggtttttatggtcaacatttgaaaaatattgccgagcttaaagacggtgctaaggtagcgattccgtctgatcctgccaatatgactagagctctgctattattgcaagaaaagaaacttatcaccttaaagaatacgtccaaaaagaccaaggctatcgaagatattattactaaccctaaaaaattacgaattgaacctgtagcattacttaacctcaatcaggcctattttgaatatgaccttgtctttaatttccctggatatgtgacaaaaatcaatctagttcctaaaagggatagattattatatgagaaaaaaccagatatccgttttgcaggtgccttggtagctcgtgaagataataaaaatagtgataaaataaaagtacttaaagaagtactaacaagtaaagagattcgtcactatatcactaaggagattccaagtgaagcagccgttgcgttctagatagataaactatgaaccctccttctttatagatggtgggtttttattgccttttttctattttctgaagcaactaatagaactagcaatttatgaaagcgtgttatttattagattgaccttattttatatctttttacttttaattgtgttacactaagtaggttgtcagaaaagataactaataaaggttcataaggcagcttcgcactgtcttttagaaaagagaaacatttgaaatttacagaacttaacttatcgcaagatattctttcagcggtagaaaaagcaggctttgtagagccatcaccaatccaagaaatgactatcccacttgctcttgaaggcaaagatgtcattggtcaagcgcagacaggtacaggaaaaactgcagcttttgggttaccaactttaaataaaattcatactgaagataatactatccaagcacttattattgctcctacacgtgaacttgcagtacaatcacaagaagaattgttccgttttggacgcgataaaggtgttaaggtccgctctgtttatggtgggtcaagtattgaaaaacaaatcaaggcattacgttcaggagcacacgttgttgttggaactccaggtcgattacttgatttaattaaacgtaaagcacttaaacttaatcacattgaaactcttattcttgatgaagcagacgaaatgcttaacatgggatttttagaggacattgaagcaatcattagtcgtgtaccagaaacacgtcaaactcttttattctcagcgacaatgcctgatccaatcaaacgtatcggcgttaaattcatgaaagatcctgagcatgttaaaattaaagcaactgaattaactaatgtgaatgttgatcagtattatgttcgtgttaaggaaaatgaaaaattcgatactatgacacgtttgatggacgttgatcaaccagaattgtcaattgtctttggacgtacgaaacgtcgtgtagatgaattaactcgtggactaaaattacgtggtttccgagcagaaggaattcatggagacttagatcaaaataaacgtcttcgtgttatcagagactttaaaaatgaccatattgatattcttgttgccacagatgttgctgcgcgtggtttagatatttcaggcgttacacatgtttacaactatgatattccccaagatcccgaaagttatgttcaccgtattggacgtactggtcgtgctggtaaatctggtcaatctatcacttttgtttcaccaaacgaaatgggatatttgacaattattgaaaacttaactaaaaaacgtatgactggaatgaagcctgctactgcaagcgaagcatttcaggctaagaaaaaagttgcattgaaacgtattgcacgtgactttgaggatcaggaattagtttctaaatttgataaatttaaagccgatgctttagaattagcaactcaatacacaccagaagaacttgctctttatgtcttaagcttaacagttcaggatccagaatcgttaccagaagttgaaatcacacgtgaaaaaccattaccatttaaaccatcaggtggtggctttaaaggtaaaggtggacgaggcaatggccgtggtggcgatcgtcgacgcaatgatcgtggtgatcgtcgtggaaatcgtgaccgtgatgatcgtggtagtcgttgtgattttaaacgtcgtgatgataagttcaagaaagataatcgtcgtcaagaaaataaaaaacctcataaaaacacttcaagtgaaaaacaaactggatttgttattcgcaacaaaggcgataaataagaggattatgaaaaaggagttgctgagcgactccttttttattttttgtaagataaagcgtagatagtgatatccataaaattgccttataactttaagaatgaagacaaaagattaaagtgaggttgaaatttaaaagttaaagaagcgaggataggctcattacacttagtatattatcgtattattgttcatttttatgttgtttaatataagtcaattttgcttgccgagtcttttgtttaaataatgcttctgccctcattgcttcttgtttgctattaaaagcttcagaataaagaagttttactggcaatctcgcacgagtatatttagcaccttttccagtattgtgtgtattgagacggcgcttgacatctgtagtataacctgtataaagtgttccatctgaacattctaaaacatacatataagcaggaactttaatcatgagattttccgttttctccgaaatatatatcaaaaatagtctcagtatagtctccattatcttgatgaacaacaagaggaggaagtattttcataccttctgtcgagccatctttaatagcttcaattaaaagcatattagcatcttttcctaattttggataaacaaattggatacgtttaggtgctaaattgaactgacgcatcgtatcaataatttcaaggaaacggtctggacgatgtaccatagcgatacgtccttttgtttttagagcatgttgagcaatttgacaaatctctctaaggtttgttgttatttcgtgtcttgcaaggagataatgcgggcttagattttttttagaggtttcgcttgctttgaaataaggtggattgcaaagcattaaatcaacgtttgaacgttgaacatgatcaagaagattttttaaatcatcattaatcatagtaacctgtttttccaatttattgagcttaatcgaacgcttagccatatccgcaaggctctcttgtagttcgatctctataattgtcgcatttgttttggtgctggcaaacaaaccgacagcaccattaccactacataagtcaacgataagaccacgagaaggaagtttagggaaccgagacaataaaacactatctatggaataggaaaaaacttctttgttttggatgattttgacatcagttgaaaaaagctgatcaatgcgttcattttcttttaaaattgtatctatcataggcttattatagcaaaattacagcttcctagcactagttttgaaagtgtggaggttgattttaagataattctttctaaaaaaaaggaagcatgataaaatagaagttacttgatgaaaggtagaggagaaacatgttctatacttacttacgtactttagttatgttcttgatttgggtggctaatggtaatgcgcactatcataatgaagataaaatgttaaaagatgatgaaaattatattttagtagctccacacagaacattttgggatcctgtgtacatggcttttgctgctagacccaaacagtttatttttatggccaaaaaagaattattcacgaatcgtttgtttggttggtggattaaaatgtgtggtgctttccctattgatcgtgaaaagccagggcaagatgctattcgatatcctgtaaagatgctgaaaaatagcaaccgttctttggtgatgtttccgagtggaagccgccactccaaagatgtcaaaggaggcgtagctgttattgcaaaaatggcaaaagtcagaattatgccagcagcatatagaggtcctatggtttttaaaaatctattaaaggggcatcgtgttgatatgaattttggtaaccctattgatgtttctgatattaagcgtatggatgccgaagggattgcagaagtatctcgtcgtattcaggaagaatttgatcgtttagatagagaaaatgaaacttatgatgatggtaagaaattaaatccattgacttatatttatcgtctacctttagcaattatagctattgtcttgcttgtcctaactctaatttttagttatttagcaagctttgtgtgggatccacaaaaacatctaaaataagggttacatggaaactatttactttttagtaaatagtttttttggtttttaataggaaaatctctttagttacgaataagtaaatggaggaatatttttatgtttgaaatagtattggaaaaaattaaatcgcataaatgggagacaacaggaattattgtaggactcttattatttggaattttgggtttaaatcattttggcactcatcataaagaagacaatttaaatatcaatttagagaaaaaagtatcaactataacagaaaaaaaggtaccaatgattagtcacgtcaaagataaagtatctaatcaagtaacggttgacgtaaaaggggcagtcaatcatccaggtgtttatagtttgccttctcaaagtcgtgtaacagatgcgattaagcgtgcaggtggactaagcaatctcgctgatagtaaatccgttaatctagcacagaaattacaagatgagacggttatctatgttgctcaaaaaggtgaaaaaataactgttgtggaagaggagaaagcaaataatatcgctactcagggaaatagtaaggggaaaattaatcttaataaagcagatttatcaagtcttcagaccatatcaggcgttggggctaaaagagctcaagatattttagattatcgtgatagtcaaggtggttttaaaactattgatgacctcaaaaacgtatcaggtattggtgagaaaacactagaaaaattacgtcaagatgttacaattgactaagtattttcctctaaaacctatttatttagcattgttggtcttccaaatttacttactagtgttttcttggacaatgcttggttgtgcctttcttttattttcttttatttttctgatttatcaatatgatcgtgaaactatttttaaaacaatagcaatagtaatttttttcttattttattttttatggcaaaatcacaatatgaatgtccaatatcaaagagtaccgaatcatattagccagattaaagtgcgtattgatactatttctatcaatggtgatgttttatcattccaggcagatgcttcaggtaacacttatcaagctttttacacattaaaaaataaaagtgagaaagattattttcaaaatcttgataataatataatgataattgcagatatcaaacttgaagaagcagaggagagaaggcattttaatggctttgattatcgtcagtatttaaaaagacatggaatttatcgtatcgccaaagtgacaaagataaaacagatacgcttatttcaacataggtctttctttgctcttatgtctaagtggcgtagaagtgcaattgttattagtcaaacttttccaaatcctatgcgtcactatatgtcagggcttttgtttggatatctagataagacctttgatgacatgtccgatttatatagtagtctaggtattatacatttatttgctttgtcaggtatgcaagtaggtttttttctcggtatttttcgttatatctgtctacgtattggcttacgtctagaccatgtttggttacttcaaataccattctcgctaatttatgctggtttaacaggctttagtatctcagtcgttagggcacttattcaatctttattatcacatagcggtgtcaagaaagatgagaactttgctctctgcttgttaatttgtcttatctccctcccccactcacttttgactacgggaggagttcttagctttgcttatgcttttatacttacgatgacctcctttgatcatttttcgagtataaaaaaagtagctatcgaatctttgacagtctctgtaggaattcttcccatactaacctactatttttcgggttttcaaccaatatcaattatattaacagcacttttatcttttgcatttgatattatatttttgcctttattaactgttatatttgtcttatcgcctatcgttaaattaagttgtattaatagtttgtttgaaatcctagaagtgttattaaaatggactgggcaactgtttccaaggccacttatttttggaaagcccagcctttttcttttaatagtcatgattataattttgggattactttatgattattatcattctaaatgttttcgttattgctcccttcttattatctttaccttgttttttatcactaagaatccaattactaacgaggttgcgattttagatgttggacagggagatagtattttagtgagggattggttaggaaaaacaattttaattgatactgggggaagggtgagatttgaacagcctgaagaatggaaacaaaaagtaaatcagtctaatgctaagagaacgctcattccttacttgaaaagcagaggtattagcaagatagatgatttagtgataactcataccgatacagatcatatgggggatatggaagttatctcaaagcattttaaagttgcacgtttgattacaagttcaggttctttaacgaattcgcagtacgttaagcatttatcaaagataggtgtagcggtaaaatctatagaagccggtgataaacttgctgtcatgggaagttatttacaagtactttacccatggcacaagggtgatggaaaaaataatgattcaattgttttatatggacatttattaggaaaaggcttcttatttaccggtgatttggaggaagagggagaaaagcagttattagaagcttatcctaatttatcagtagatatccttaaagcaggacatcatggttctaagggctcatcaagtctatcctttctgaaaaagttgtctcctagtgtggttctagtttcagctggtaaaaataatcgttaccagcatcctcatcaagagactttacaaaggttccaaaagattaaaagcaagattttccgaacggatcaatcaggtacaattaggctaacaggatggtggaagtggcatattcagacagttcgttgatttataaaaatgattgcgtatctgttaaatacaatctatttttcgcaagaattcagtaattttaagcttgacatggaacgggttccagcatttatactgatttcagaagaagagaggtattttttatgactatcaaacgtattttttgtgacatggatggtacactattaaatagtgaaggacaagtgagtaaaagtaacgctaccttaatacgtgaggcagcgattccagtaactttagtgtctgctagggcacctatggaaatgaaggatgccgtagatgcacttcaattaggaggagtccaagttgcttttaatggaggattgatttatagaataggagataataatcaagttctacctattcatacacaaatcattaaaaaaagcacagtaaaacaattgctaagaggaatacggtttcattttcctcaagttagtttatcttattacgatcttaataactggtattgtgataaaatagatgaaggaatccgatacgaacatagtttaactcaacaatgcccaacgtttattcataatgaggatcagtttttagaaggtcacacaaatacttttaaaattatgatgattactttcgatgaagcaaatatgctagaattagaaaaatatcttcaaagtttggagttaccagaaatcactattcaacgttcaggtaaagcgtatcttgaaattacacatctcttagccaaaaaatctaaaggaattgcttacatccttcaaaaagagcagttagctagagaagaaacggctgcatttggagatggacataatgatttgcctatgcttgaaatggtaggttaccctattgttatggataatgcttttgatgatatcaaagcgatagcatatcaactaactaagtctaatgatgaagacggagtgggatatgggattcaaaaatttttaaagtaggagccttataatgacaagtattagtgatatagctaaaaaggcaggtgttgctaaatcaacagtttcccgtgttatcaatcatcacccacatgtttctgatgagacgcgacaaaaagtaatggctcttatcaccgaattggattatataccaaatcaactagcgcgggatttaagtcgaggcaaaacacaaaaaataggtgtcgtcattccccacacgcgccatccttattttacacaattaataaatggcctattagatgctgctaaaactaccgactatcaacttgttatgatgccttcggattacaaccaagaattagaactttcctacttgaaacagctcaagatggaagctattgatgctttaatattcacttcaagagcaattagcctcgatattattgaaacttatgcaaaatatggacgaatagtagtttgtgaaaaattgcaggaatataatcatctatcctctgcttaccttgatcgctattcttcatttctagaggcgttttctgatatgaagttacgaggtttggagcacttagttttattattttcaaggaataatgaatcctctgctacctatcaatccgcattattagcttatcaagaggtctatgggcaactatcctctccatatatggtagttgggaatgttcatgactttaatgatggactaaatttatcttatcaattggtaaaagaagttagtatagatggtatattagctacaagtgatgaagttgcggcagggctaataaaaggttatgaagaaagtaggaaaaaatgtccttatattattggtcaggaatgtttattagttgggcaacttttgaaactcccaacaattgaccacaaatcctattatttagggaaattagcttttaaacaggctttagctgaaaagattagtcaagaagttttattctcagagtttttatctcaagacaattagtcattcaaaagtaatagaaaaaaggtttccaactaaacttgattggaaacctttttatttaatgattgataattttaagcatttgtttgaaagcagtctctgcttcaggaatcggtaagactggataaacgtggttcattttttgaccaacgatatagtggtgtttaatgttttcttttgctaatttttgatgtaataattgattatcggggtagaaaatatcgtgcgttcctataaaaaatgatattggagccatcttgttaaattggctactgtaaagaggactaacttgaggatttttaaaattcttttttccatttgcccagtaaggagctacttgttgtaattgccaagctttaagaaggggatcttttttttgaactttttcaatctttggattattagtagcaatatctaaccatggtgatattaaaataatttcttttggttgtttgatatgctccgtgacaaggttatcagcaagacctaaagcaagacctccgcctgcactttcacctactaggataatttgtttgggagatgtgacgctagctaatgtattttggtataattttttaattttggggatagcatcactataattatatgtaggagctttagggtaaataggaaagacaacttttgcatctaattttttagctagtttattgacaaaaatatattgtaattcagaagcttgatggatatatgatcctccatgaacatagaagataaccttttgcttaggattatttttatcattccaagtgaatgtttgcatgccatcagtagcggtaatttctaccttttcattatttaatgcctgaggaatgtctacaggaagaacattacgtttagctaccttagttaagtaattttggtattctttgatggtttgaggcttaatctgatttaccacaggtagagttttttcaatagtattgctagttagggatcttttttcaacaatatgagtgtaagcatatgctcccataaaaatgacaaaaaaggttagaagtagtagtacaataagttttcgatagtttttcatgattatccttttgtaattgagctcgtcatgctaaaaatgattagttgttattctataataaagtagatacgaaaacaagaaaataatgctataaaatttcaacctattataattttttgctgatagtacgtattaacctttaatttgctaaaatagaagagaggagagtgttattatgtttcacagagaagatttttcaaaagcattattaaaaaaagctttgcagcccggtatgagagttatggatattggttgtggtagtggggaattgacgcgtttggctgctgatatcgttggtaaagaaggtgatgttgtaggaattgatattaatgagcaacttttatggcaagctagacatgataatggctatgctaatgttagttatcaaaacgcagatttagcagcactttcctcctttgaaacaaaaagttttgatgcaattattggacgtcgtgtattaatgtatcaaaaagatccaaagaaagtaatagaaagtttaacacctttgttaaagccaaatggtttttatgtttttcaagaaagtgatgcaatgtgtttagaactagctaagcctagctttgtaaatatgaataaaatacaatcactaatctggcaaactgttgagaaggaaggaggacacattcatattggaagtcaacttgagcaattaatgttagaagcaggcttaatcgttgaccattttgtatcagaaaatgtcattcaaacgtcacaaactggtacagatttatcttggctactaaatatcatgaaagaaagaatacaaaaatatagtgaccttcagggattagaagatgtcaatttacaaaaagaattagaagagaataatgaccattttatccgagattgtcaatttggaattatttctcatagagttgatgaatgattttaagtattatttgacaccttgaaaagtttccttatggtataataaggaatatgattgcgattgaagaaattgggagaattaccccagataatttagggttagtaactgttttagcaggagaagatttagggcaatatgctcagatgaaagagaagctatttcaggtaattggattcaataaagacgatttagcctattcttattttgatttaagtgaagaagactatcaaaatgcggaattagacttagaaagtttaccttttttatcagactacaaggttgttatttttgatcagtttcaagatattacaactgataaaaaaacttatttagatgaacaagcaatgaagcgctttgaagcctacttgcagaatcctgtagatactacgagacttgttatttgtgctccaggaaaacttgatggaaaacgtcgacttgtaaagttattgaaacgtgatgctcgtgttttagaggctaatactttaaaagaatcagatttaaagacgtattttcaaaaatatgctcaccaagaaggattagtttttgaagcaggtgtttttgatgagttattgattaagtctaactatgattttagtgatactttaacgaatatcgctttcttaaagtcatataaaacagacggtcatatttcgtccaatgatgttagagaggctatccctaaaagcctgcaagataatatatttgatttgactcaagatgtcttacttggcaggatagatttagcgcgtgatttagtaagagatttacgtctacaaggcgaagacgaaatcaaattgattgcaatcatgttaggacagtttcggatgtttttgcaagttaaaatattggctagtaaagggaagtcagagagtcaaattgtttctgaactatcccattacataggacgtaaaatcaacccttatcaagtaaaatttgctgtcagagattctagaaaccttccccttgcttttttaaaagaagcgattaggattttaatcgagactgactatgctattaaaagagggacttatgataaggattatctctttgatttagccttattaaaaattgctcataaaaagccctaattaaagaaacaaaagagttgaaagctgttccaaattcctatagaataagggtaataatagatgaaaagaggatttcgacatggcaattattttaccagatttaccctatgcatatgatgcgcttgagccacatattgatgctgagacaatgacactacatcatgataagcaccatgcaacttatgttgctaatgcaaatgctgctcttgagaaacatcctgaaattggagaagacttagaggcgctcttagctgatgtttctcaaattccagaagatattcgtcaggcagtcatcaataacggtggtggacatcttaaccacgctcttttctgggaattgatgtcaccagaagaaactcaaatttcacaagagttatctgaagacattaatgcaacttttggttcatttgaagactttaaagctgctttcacagcagcagcaacaggacgttttggttcaggttgggcttggcttgttgttaatgctgaaggcaaacttgaagtgctttcaactgccaatcaagatactccaattatggaaggcaagaaacctattttagggcttgatgtatgggagcatgcttattacttaaactatcgtaatgttcgtcctaactacatcaaagctttctttgaaattattaactggaataaagtaaatgaactttaccaagctgctaaagcttaataaaaaacgagtcgataggctcgtttttttattattctaaaagttgataatgttttttaaaagtctagaagtccaaactcagataaaactagaatagtcctattatcttcaactaagcgaataagtttattgaaagcgcttgacaagattagtaagaaatgataaaattaagacgttttcaggtgttattatttaaggtaagcaagctgataacagataaaattgcataataaaggatgttatcacattttgtgagcagggacctattcaacgacgactttttgttgtgtcttggatgggtcattttttattgtgcgagtgaaggactaggactttaatgattataaaacgcgtattaaatcataatgcagtcatatcagtaacacatcaaggattagatgtgctactgatggggaaaggaattgcatttaagaaaagaataggtgataggattaatagcgatgctattgagaagtcatttgttttaaaaaatagtgataacatgaaccgttttacggagttatttattactgttccagaagaagtagttgcatgttcagaacgaattatcaacctaggtaaaatcaaattgggtaagaacttagatgaaattctttatatcaatttgacagatcatattcattcggctattgaaagacatgaacaaggaatggttatccaaaatccactaaggttggaaatccaacgttactatcctgatgaatactccattgggatgaaggctctggaacttataaaggatgaattgggcatttgtttaacaatcgatgagtcggcttttattgctatgcactttgtaaatgctggattggataatccgtttaatgaagcgcataaaatcactgagattgtatcttacattgaacagaaagtaaaaatagattttcgaacagaactagatgaaagttcaattgattattatcgtttcatgacacataccaaattatttgctcaacgcgttttatcaggaatgaaatacgaagatgatgatgctgatttacttttggtagttaagaaaaaatatccgagagaatataaatgtgttaaagagatcggcaacaatatggctatccaataccaatatcaacttaattcaagtgaactcctatatctgacggtgcatgttaaacgattagttaaaaatttaaaggagatatcagatgactaaataccaagagactgctaaagctattttagcagcagtagggggagaaaaaaatattcaacacgtaacccactgtgtgacacgattacgattagttttagacaatgatgaaattgtcaacgatcaggttattaaaactattccgaatgttatcggtgttatgcgtaaaaatgatcaataccaaattattttgggaaatgatgtcaataattattataatgcttttttggccttaggtcattttgaaaatactaccagagaattttcatcacaaaaaaagagttcaatacttgagaaattaattgaaacgattgcaggagtcattacgccgcttatacctgctcttctaggaggagggatgctcaaggttataggtattttgctccctatgctcggtatagcaagctctagttctcaaacagtagcttttatcaatttttttggtgatgccgcttattattttatgccaataatgattgcttattcagctgcgtcacgatttaaagttacacctgtattagctgctacagtaggagggattctcttacaccctgcttttgtgacaatggtagctgaaggaaaaccattatctttatttggagctccggttacactggctagttatggttcttctgttattccaatcttaattatggtttttcttatgcaatatattgagagatggattaataaaattgttcctagtgtaatgaagagttttttacaaccgactttgattattctcatttctggctttttagctttagtggtcgtggggccactgggggtaattattggtaaaggattgtctagtgcaatgctttcgatttaccatgtggcgccatggttagctttatctattcttggtgctattatgccattggttgttatgacaggaatgcactgggcatttgctccaatatttttagctgcttctgttgcgacaccagatgttttgattttaccagcaatgttagcttctaatttagctcaaggtgcggcttctcttgctgttgcagttaaggctaaacaaaaacaaacacgtcaggtggcctttgcagcaggtttatcagcactactagctggtatcacagaacctgcactttatggtgtcacactgaaattcaagaagcctttatacgctgcaatgatatcaggtggtttagtaggagcttatattggattagttaatattgcttcctatacatttgtagtaccatctattattggtttgccacaatatatcaatccacaggggggcaataatttcagtaatgctgttattgcagcaatagctactattattttgactttcattattacatggttcttgggaattgatgaaggagaaaacgaaaaaagtagtattaatgctcaagagcacacacatattagaagtggtttatcaaaaaaagagacattgtattcacctatggtaggcaatgtattacctttatctaaagtacccgatgaaacattttcatctaaattactaggtgaaggtttagcaatcactcctagtgtgggtgaagtttatgcaccatttgatggtgaaattataagtttatttcctacaaaacatgccattgccttaaaggatgataagggagtcgaagtgttaatccatattggaatagatactgtagaactaaatggagaaggttttgaacaattggtcaaagttggcgattttgttaaacgaggacagttacttttgcgaatggatattgattttattagttcaaaggggtattctcttattagtccggttgtagttacaaattcaattgaccaacttgaaattatcgttaaagacgcagagacaatggttacaaatgaagatgatttacttgtaattctttaaaaggaaggatgataatatgacggtttttcctaaacattttctatggggaggtgcagttgctgccaatcaggtagagggtgcatttagaacagatggcaaaggtttatctgtacaagatgtacttccaaatggtggtttaggcgatttcaccgccaaacctactccagacaatttgaagctagaagcaattgatttttatcataactataaaaatgatataaaactgtttgcagagatgggctttaaagtttttagaacctctattgcctggtctcgaatttttccaaatggtgatgatagtgctccaaacgaagctggcttacaattttatgataatttatttgatgagttgcttaaatataatatcgagcccttggttaccttatctcattatgaaacaccgcttcatcttgcaaaaacttataatggttgggctgatagacgtttgatagcattttttgagaaatttgctcaaacagtcatggagcgttataaagataaggtgaaatattggttgacttttaatgaagtgaattctattttacatatgcctttcaccagtggtgctattatgaccgacaaatcacaactaagtcctcaggagctttatcaagctattcatcatgaattagtagcatcggctagagtgacaaaattagggcgttctatcaatcctaattttaaaattggctgtatgattctggctatgccagcttatcctatgacatctgatccaagagatgtcctggctgcaagacaatttgaacaacataatctgctattttcagatatacatgtcagaggtaaatatcccacttatattcagtcctatttcaaaaataatggtattaaaattaaatttgaagaaggagatgaggaagtattggcacaaaatacagtagattttctatcgtttagttactatatgagcgtgacacaagcttatgactttgaaaattatcaaagtggtcagggaaatatccttggaggcctaactaatcctcatttaacaacttcagaatggggatggcaaatcgatcccatcgggctacgcctagtcttaaatcagtattatgaacgttatcagattccgttgtttattgtagaaaatggattgggagcaaaagatcaattgatagaaacactagacggtgattatactgtcgaagatgattatcgtattgattatatgaatcaacatttagttcaagttgctaaagctattgaagatggtgttgaaataatgggatatacatcttgggggtgtattgattgtgtatccatgtctacagctcaactaagtaaacgttatggtctaatatatgttgatcgaaatgatgatggaacagggagtctacaacgttacaagaagaagtcatttggttggtaccaaaaagtgattaagacaaatggccaatcattgtttgaacatcataacagataacatgttaaacaactagtctctgtttcaatttaatataaaaaggagtatccataggttactcctttttattataatttatgaaggttaatatcttctgatttaagtgctagatacaataaagttgcatccttaaagtttcttggattgagttgcgttgattcataaatcttatttaacctatattgaacagtatttttatggataaaaagttcctgactacattcttttaatgatagattatgcttaaaatatgagttaagcaagatcttatcattttcagataagtttacaagcgctttatttagcacatattgtttaatattagaatcaatacttgttaataacagttcaagatcaaggtcgtcgacgaggttgaccttttgttgaccttttaaagctttcagggctaagatagacgtttcatatgatctttttaaaagtgataaagatgatttttgtccgataccaactttatagaggcccttttcgcattcaaactttgataggatatttggataataatagtcaaacatatggtcagaaagtaaaagccagtattgattgggataattaaaggtataaatagcagtgtcaagtttatcaaaaaagttcaagagtgacatttcagattgacttaagagtaatttttgtttttgactattgatttcaaaagtgagtagacgatagtcagttttttctgataggtggtattggtttaaaaattgattgaggtaatagtagtctaactctctgccttcaacaagatgatgtaagacaatagaagcttcgttttttcgcccgaaatccagataatctaattcatgctcttttaagatgagtcgagtcattttttgagcaagtaaagcatattttcctacttggttggggtttccactaatcccaatagtagctaataattcacaattataatagaaaggaatattgatccctgcttgtgtcccaaaataagattcttgatctgttacttcaatcatttgtcctgtctgtgctacttttaaaccaatttcatggaattctccaacacgttttggattggtactagcgaaaatgattcctttggtattaataaaattaatatcttgttgacaaacatctttgatagaggtaacgatttgttgtgcgagttgttttcttaatttcattcagcttaccttttgttatatataacaaatatcatatcataaaaacgctaacatttgttctgtagtctatattttttgttatttgattttgttactataattgagtgatataaaatagtgaaaaaaataacaaagattcacaaaatattttcaaggaggttttcaaatgaaggtagtagtagctattgattctttgaaagggagtctttcttctttagaagctggcaatgctataaaggagtcaattaatgaagtaatctcaggggcggatgtggaagtacatccattagcagacgggggagaaggaactgttgaagctttgacgctaggtatggggggtacgatcgaaacaatccctgttaaggggcctcttggagaaaaagtacatgcgagttatggtattattccacagcgtcagttagctattattgaaatggctgcagctgctggtattaccctaattgctactgaagagagaaatcctctccacacaaccacttatggagttggagaaatgataaaggatgctataagtaaaggctgtaggcactttattattggtattggaggtagtgctactaatgatggtggggcaggtatgctacaagctttgggatatgcattattagataaagataatcaagaaatcagtttgggagcacaaggattggcagatttaaaatctatctctactgataaggttattgaggaattaaaagaatgtgattttaaaattgcatgtgatgtaacaaatcctttatgtggtgctcaaggttgtagttcgatttttggaccgcaaaaaggtgctgatgaagatatgattacaaaaatggatacttggttaagtaattatgctaccttagctacttcagttagtgaaaaagcagatgcaactattgaaggaacaggtgcagcgggtgggcttggatttgcctttttagcctttacaaatgctaccttagaacctggtattgatattattctatcagaaattaatatagaaaaagcgatttctgaagctgatttagtagttactggtgaaggtcgtttggatgggcaaacggtgatgggaaaagctccaattggcgtagcaaaattagctaaaaaatatggtaagaaagtagtggcattttctggatctgtcaccgaagatgctatactttgtaatcaacatggtattgatgctttttttccaatcgtacgacgccttatcagcttagatgaggctatgtctaaagaggtagcttataaaaatatgaaagaaactgctactcaagtctttagattaatcaatttgtataatcattaatattgaaaggaattttgataagttatggaagctacatttacaacaacaggggctttaataggattagcgcttgctattttactgattatcaaaaaagttcatcctgcctatagtctcattcttggagcattagttggtggtttgattggtggcggtgatttagttacaattgtcaatacaatggtattaggtgcgcaagggatgatgtcatccatattacgcattttaacatcagggattttagcgggtgctttaattaaaaccggatcagctgaaaaaattgcagaaagtatcattaaaaaattaggacaacagcgagccatcacagctttagccatcgcaacaatgattatttgtgcagtaggtgtctttattgatattgcagttattacagttgctccgattgcattagcaataggtaaaaaagctaatctttctaaatctagcatactgttagcaatgattggtggtggtaaggctgggaatattatctcacccaatcctaatacaattgctgcttcagaagcatttaaggttgatttaacaagcttaatggtacaaaatattattcctgcaattgcagctttagtagttacgattatattagcaaagattgtttccaagaaaaataacgatatttcttatgatagtgaggagcaagtgggctctgatctgccagcattcttaccggctatttctggtccacttgtggttatctgcttattagctcttcgtcctttatttggaatcactattgatcccttgattgcactgccgttgggtggtctaattagtattttagcaacaggttacctaaaagaaacggtaccgtttgttgaatacggtttatcaaaagttgttggcgtttcaattcttttgattggaacaggtacgctctcaggtattattaaagcatctaatctacaatttgatatgattcatctccttgaatttttaaatatgccgacctttatccttgccccactctcaggtatttttatgggagcagcaacagcatcaacgacttctggaacaactattgcttcacaaacgtttgctgaaaccttgattaaatcaggggtaccggcggtttcgggtgcagctatgattcacgcaggtgcgactgttttggattcgctacctcatggatccttcttccatgcgacaggcggagctgtcaatatggctataaaagatcgtatgaaactaattagctatgaagctttgattggattaactagcacaatagttgctgtcgtttactattgtttctttgggtaaaatttggatgaatacgtgatgtttattatcactgtttgaatagaattctcattgattttttctaattttcttactataataaattagtaggagaggtgttgtgaaacaaacaaagaaagaatttattttaggattaaccattattattacccttactttattaatcatgctgatttttttagtaatgtttaataagtccagtaactctaagttgaagcagacaaaagatagaagaatatcatctacttcaaccacaaggacatccagtagctcacatgatcaaaaaattgtagaaaagtctcttgaaaaaaagaaaatggtcatggaacaagatatggaattgatgaatgcctataggctctattatgattatgcccatttgtccttgaaagaggttgttctggcctatatgtctgaatatggcattgaaaaaaatagtgttgctttttcttataaaaatttaaaaacaggacaaagggacgctatgaatgatactcaggctatgacagcagggagcacctataagttacctcttaacatgttggtagtagatgcagtggtcaagggcaagttgtccatggaagaacgctttgatattaccgagactgactatgaatatattggtgaacataataattatgttgctgctttctcgggggcaatgtctattgatgatatgcaaaaatactctttagtttattcagaaaatacacccgcctatgctttagctgagcgtattggtggcatggatagtgcttattcaaagtttggtcgttatggccaatctaaaggagacatcaaaaatatacaaaaaaacggtaataaagtgacaacagattactatattcaagtgctagactatctctggaaacatcgtaaaaagtatgatagtttaattacttatttagaagaagcttttccaacagattattatcgtgctttgataccatctgatgttgttgttgctcaaaagccagggtatgtccgtgaggcgttgaatgttggagcaattgtcaaagaagaagtgccttatattgttgctatttatactgcaggtttaggtggctctactcaggaagattcagaaattaatggagtgggactatatcagctagaacaattatgttttgttattaatcaatggcatcgtgttaatatgaattagaaataaatctatcaaaataataaaaacctcttagattaactatctaagaggtttttataaatgtgattttataacttggttaagtgaagaaagggcagaaacagttttttgataagattcaggactaatttctgagaaaaaatacccgcacgattgcaccgcattgacaacggcatcttgtgactcaatacctttgttacttagatgaataatgagttgccttttatcatctcttggtttttctcgtacaatccacccacgattttccatacgctttaaaactggagttagggtattcgaattaagagatagtgcataactaagttccttcatatgccgatgatcctcttcccaaaggactaacaagataacgtattggagataagtcaattgaaattcatccaaagctttttggtaaaatttattgaaaagtcgatgtgtttcactaaccgtaaaacataatcgctcgtctaaaatacttcgattactcattatcatattgtagcattttggaggcgttatagtatgtcaatcgtgttaaaaaatgataaaactttttcctaattgaaagcctattcttacttaacaaacatagcatcaccaaagctgaagaaacgatatcgttcttcaactgcatggttgtaagcttctagtacaaaatcacgtccagcaaatgctgatactaacatgacaagagtagactttggtaagtgaaagttggttgaaaaagcgtctacaaccttgaactgataaccaggcttgataaaaatatttgtccaccctgagtcggcttttaattcaccattgaatttagaaccgattgtctctaatgtgcgaatagaagttgtaccaacagctacaatacgtccaccagattctttaactgcattgagagtatcagcagcttctttagataattggtaaaactcagaatgcatttcgtgttcatcaagattatcaactgaaacaggacggaaagttccaagtccaacgtgaagcgtcaaatagacaagcttcacaccttttgtttcaattttttccaatagttcttttgtaaaatggagaccggctgttggtgcagcagcagaaccattttcttttgcatacacagtctgatagcggtcacgatcttctagtttttcatgaatatatggcggaagtggcatttcgcccaaactttcaaggacttctagaaaaataccatcatatgagaattctacaatacgcccaccatgttctaattcctttgtgactgttgctattaaccgaccatcaccaaatgaaactttggtccctactcgtaagcgtttagcgggtttagcaagcacttcccattgatcgccttctgtatttttgagaagtaataactctacatggccgtgtgtatcttgcttttcaccataaaggcgagcgggcagaacacgtgtgttattcattactaaagcatcaccaggcttgagttcatctaagatatgatcgaaatggctatctgtcatcgtcttattcttatgatcaatgactaataatttagaagcgtctcttttttcaagtggtgtttgggcaatgagttcttctggtaaataaaaatcaaaatcgtttgtattcatgatttctcctatctataagtaagcttttctattatatcacgttcagtaaaaatgacccaactaatctttttatttagaatgattataaaaaataattgtaatcattctaaataagtgatataataattgtcagaaagtgagaagtagagaagatgaaagaagcaaaaaatttttcccaacaattgaatattttaagagctggtgttcttggtgctaatgatggtatcatctctgtagctggtgttgttattggtgttgcgagtgcaactcataacctttggattatttttttatcagcagcttccgcgattttagctggtgcattttctatggctggcggggagtatgttagtgtttctactcaaaaagatactgaacaagcagcagttgcgcgtgaagagaaactactagaaaataatccagaacttgccaaaaaatccttagttgatatctacttagcaaaaggagaaagtcacgaacatgctcaatggctagttgacaaggctttttcaaagaatgctattgagcatttagttgaagaaaaatatggtattgagttcggtgaatatacaagcccctggcatgctgctatatctagttttatagcttttgccatcggatcaatttttccaactataactattctgttattgccattttcggtacgaattgtaggaacggtaataattgttattgtttcactattatcaactggttatgtaagtgctaagttaggtcaagctcctacagtacctgccatgcgtcgaaatgtgatgattggttgtttgacaatgttggcaacctacgtcattggacaattattttcaatataaaatattaatcgtggagttattgtctaaactagaatggacagtaattctttttagttttataacgaaattaagaagtttttattgacaaaaattggtatataccatataatataatcataaaggtctataccaaataaaaggagagtaaacatgagagttattacagttaagaacgacattgaggggggaaaaattgcatttactcttttagaagagaaaatgaaagctggtgctcaaactttaggattggcaacaggaagtagcccaatcaccttttacgaagagattgtaaaaagtaatcttgatttttcaaatatggtttctattaaccttgatgaatatgttggaattgccgcaagtaatgatcaaagttactcttattttatgcataaacatctttttgatgctaaacctttcaaggaaaataaccttccaaacggcttggctaaagatttgaaagaagaaataaaacgatacgatgctgtcataaatgctaatccaattgattttcaaatccttggaattggtcgtaacggtcatattggttttaatgaaccaggtacaccttttgatattacaacacatgtggttgatttagctccaagtacaattgaagctaatagtcgtttctttaatagtattgatgatgtaccaaagcaagccttatcaatgggtataggctctattatgaaatcaaaaacaatcgtattagtggcgtatggtattgaaaaagcagaagcgattgcaagtatgattaaaggacctatcacagaagatatgccagcaagtatcctccaaaaacatgatgatgttgtgattattgtggatgaagcagcggcatcaaagttgtaaagtaaataataaaaaagtaaggatgaatctcaatgagaaaaaattcattcttacttttttattatgctttattaaattgtccagtctaagttaggtccagctggaataataccagtagggttaatggttttatggctaccgtaatagtgttttttgatatgatcaaaattaactgtctcagcaattccaggtaggttgtaaatacgttttgtataatgccataaatgtgggtaatcatgtagcgcttttaaattacatttaaaatgaccataataaacggtgtcaaagcgaactaaagttgtgaaaaggcgaatatcagcttcggtaaattgttctccaacaagataatggttatcagataagtgtttttctaactgatctaaagctgtgaataaggtttcaacttccttttgataaacgttctgagaagtggcaaaaccagctttatagacaccattatttatttttggataaataaaattattcatttcgtcaatttgtccttgtaaggaatcgggatagtaatcgtcagtatttccagtaatatgattaaatgcagtatttaacatacgcataatttcagatgattcattgttaacgattgtatggaattttttatcccaaagaacagggactgtcacgcgtcctgtataatcactttgacttgcttgatagatttggtaaaggtattggctttggttaatcatatcaggaataacgcctttatattcttgaaaagtccaaccattctccaacattaaagggttaacaatggagatagagatatgagattctagatttttaagctttctcatgattaatacacgtgatgcccaagggcaagctagtgaaacgtagagatgatatcgtccagattctgctttaaaacctgcatccccactaggccctgctgaaccatctttagtaacccaatgacggaattgtgtaacggttcggacgaatttaccaccagttgatgcagtatcataccattgatcaacccatttgccatctactaaaagtcccatgataatctcctttgtttttctattactaattagtagtataaagattttaaaaagaattagcaaatgtttaacttacagtatggtaaactaagggtatgcgtttagataaattattaggtcaggcaggatttgggtctagaaatcaggttaagaaattaatttgttctaggcaagtttctgtagatggtcaaattgttacaaaggataatgttattgtagatagtggtctacaatcgatttttgtaggaaaagagagggtctgcctaaaagaaagttcttattaccttctttataagccatcaggagttgtttcagcagttagagattcagaacataaaacagtcatagacttaattagcgaaaaagataaggtggagggattgtatccgattggtcgtctagatcgtgatacggaagggcttttaatagtcacgaataatggtccactgggttaccgaatgttacatccaaaacaccacgttgcaaaaacatattatgttgaagtaaatggtttcttggaaagagatgctattaccttttttgaagaaggagttgtatttgacgatggaacaaagtgtaaaccagctgaattaacgattgatacggctaataatgacaaaagtaccgcaagaataactatcacagaagggaaatttcaccaagtaaaaaagatgtttcttgcatatggcgttaaagttatatacttgaggcgtatttcttttggtgacttgaggcttgatatgaatttgaaaccaggtcagtatcgtagattgagagattcagaggcagctatcttaaaaaggtatttagattagtgaaacgactcacttgaccttgcttagtattcttcatatacttataagtgattattttaaaggagaaaaccattgaattcaaaactttcattgaaattgactattttatcgatttctatctttttgatgtctcatttagcaattgctcctgcaattcctaaattgtatgccttttaccatactcaaaaccctcatattggactagcttcagtagagagtttagttactattccagctatgatgattactatttttgttattttgagtaattttgtagtcacaaaacttggcaaaaaaaacacggtcttacttggtttatgtttaatcttaatgtctgggtttatctcattttttacaagtaatttttcacttgcgatggctagtcgactacttttgggtattggtattggtctctataattcgctatcaattagtatcataacggatttatatgaggctgatgagagagccagtatgattggtcttagaacagcatcactcaatatcggtaaagccttaactacatttattgttggattggttttagctattggtgtgaattatatttatttggtttaccttctggttattcctgttttctttttcttttggaaaaatgttccagaggttgaaaatcaaacacatacccttaaagctagtacaacatttgatactaaagcggctttgttgatgctcatcacgttcttagtaggtattgcttatataggagcaactgtcaaaattccaaccttactagtgacaaaatatcactacgcgacgagcttctctagtaatatgttaactctccttgcttttagtggtattttagttggatctgtatttggaaaattagttaaagtattccaagagaagacgctattaatcatgattctagctatgggaataggtaatgtgctatttgctttagctaataatcagatcatttttatcgtagctagtattttaataggagctagttttgttggcaccatgtcttctgtattcttttatatttcaaaaaactatgcaaaagaacataataactttatcacaagccttgccttaacagctggtaatataggagttattttgacaccgcttattttaacgaaacttccaagccagctacatctggaaccttttatgacaccatttttaataacaagtgggctgatggtgattaatgtctttgtttacctagttttaatgtcaaaaaataaataaaaagttatccgaaaggataacttttttcgaatagtaaaagtaggagaaaaaatgttaattgctaaagacaaacaaggaaatttaattaatctactcgagtctcatccgggaaagggacagtatttttgtccaacttgttgttcagctgtaaggttaaaggcaggtcgaatcatgagaagacactttgcacatattagtctaaaaaattgtcagttttatcatgaaaatgagtctaatgagcacttgcaattaaaagcaaagttatatatgagtttaagtagagagaatgaaactatgctcgagcatcatttgccagaaattaatcagattgcagatttatttgtgaatgagacattggctttagaagttcagtgtagccgactatcagagcagcgactcagggagcgaacaaaagcatatctacaggcagactttcaagtgagatggttactaggggaaaaactctggttaaagcatcgtttaacaaatctacataaacaatttttacaattttctcaaagtatcggatttcatatttgggagttagatttgaggttagaagtactgagactaaaatatttgatttacgaagatttacgcggacatgtctattacttaagtaaaacttgccctcttagtggagacgttctagcatttttgaagtggccataccaatcaaaaaatctaaatttttataaggttaaacaagacagaaatatcagagattatgtgcgtcagcagttacgctatggcaatcaattttggttacgaaaacaagaaaaggcctacctttctggtcagaatctattgacccaagagctaatgatgttttttcctcaaatacagccaccacgtgtagatactgatttttgtcaaataacaaattctctaacatcgttttatcagaattttacaaattattatcaaaaaaataagaataacttagaccaaacactttatccccctgtattttatgataaaatagtcactaagaattaaactggaggatacaaaatgtcagacaatcgctcacatattgaagaaaaataccaatgggatttaactactgtctttgcgactgatgagttatgggaaactgaagtggtagagcttactcaagccatcgataatgcaaagggtttttcaggtcatctgttggactcaagccaatctttattggagatcacggaggttgaattagatttatctcgccgtttagaaaaagtttatgtctatgcttcaatgaaaaatgaccaagacaccactgttgcgaaatatcaagaatttcaagcgaaagcgacagcgctctatgcaaaatttagtgaaacattttcgttttacgagccagaactattgcaactttcagagtctgattaccagtcattccttttagaaatgcctgacttgcaaaaatatgatcatttctttgagaaaatatttgcaaataaacctcatgtcttatctcaaaacgaagaagaattgttagctggtgctagtgagatttttggagcagctggtgagacatttgaaatccttgataatgcagatatggtcttcccagttgtaaaaaatgcaaaaggtgaggaagttgagcttacacatggtaatttcatttcccttatggaatctagcgataggacggttcgaaaagaagcatatcaagctatgtatagcacatatgaacaattccagcatacttacgctaaaacattacaaacaaatgtgaaatctcaaaattttaaggctcgtgtgcatcattatcaatcagcacgccaatcagctctatctgccaattttattccagaagaggtctacgaaactctaattaagacagttaatcatcatttaccgctcttacatcgttatatgaagttgcgtcaaaaagttcttgggctagatgatttgaagatgtatgacgtatatacacccctttctcaaatggatatgagttttacttatgatgaagctctaaaaaaatcagaggaggttctagctatttttggcgaagcatattctgaacgtgttcatcgtgcttttactgaacgttggattgatgtccatgttaacaaaggaaagaggtcaggcgcttattcaggtggatcttatgacactaatgctttcatgcttcttaactggcaagatactttagataatctttatacgctggtgcatgaaactggacatagtctacactcgacgtttactcgtgaaaatcaaccctatgtttatggtgattattctattttcctagctgaaattgcatcaacaacaaatgaaaatatattaacagaaacccttttgaaagaagttaaagatgataaaaatcgctttgcaattctcaatcattatttggacggtttcaaaggaacaatttttaggcaaacacagttcgctgaattcgaacatgccattcatgtagctgatcaggaggggcaagtactaactagcgaatacttaaacaatctttacgctgagcttaatgaaaaatattatggtttgactaaagaagataatcattttattcaatatgaatgggcaagaattccacacttttactacaattattatgttttccaatatgcaaccggcttcgcagcagcaaattatttagcagagcgtattgtaaacggtaatccggaggataaagaggcctacctaaattaccttaaagctgggaattcagattaccctctaaacgtcattgctaaagctggtgttgatatgactagtgcagactatctggatgcagcttttagagtatttgaagagcgtttagtggaactggaaaatcttgtagcaaaaggcgtccataatgattaagttgaaaatatagctattgaagtaaaaccagtcaactagactggtttttgatagtgatcagttattttatagtttgttttgagagtggttttggtaaagttagttagtggaaaactcaataggtggaaatacctacccaagttatgatttttatgagaccaaaactgctattgtcaaaaaagaagggaaataggatgaagaagcttacttttatttgggatttagatgggacattaatagattcgtatgtaccaattatggaagctcttgaagaaacctatcgtcattttggtttaatatttgataaagaattaatccatgaatatattttacaggaatcagtggggaaattattggtaaacctttcagaggaagagcaaatacctcatgaaaaactgaaagcatattttacaaaagaacaagaaagtcgagattctaaaatacatttaatgccatatgcaaaagagattttagaatggaccaaagaacaagatatccccaattttatgtatacacataaaggagcaagtacgcattcagtgttggaaaccttgcagatctctcattattttgatgaaattttaactggtgtttcgggattcgagcgaaaaccacatccacaagggattaattatttagttaaacgatattctttagataaatcaatgacttattacataggagatcgtccactagatttggaggttgctcaaaatgctggtataaaatccataaacttaaggttagagaattccaaagaaaactataatatttcaagtctcaaagatataatatcacttgatttcactcgtttggattaaatcattctcagagttagacattttttgctataataaaaaagttattatttaaaatagaaaagaggagccaaaagtggttcaatcttacagtaaaaatgctaatcataatatgcgtcgtccagtagttaaagaagaaattgttcaatatatgcgtcagcaccaaaaacaaaataatggctgtttagcagagttagaagcatttgctaaacaggaaaatatccctattatacctcatgaaacagcgacttattttcgttttttgatgcaaacattacaacctaagcacattttagaaattggaacagctattggtttttcggcccttttgatggcagaaaacgctcctgaagcaaagataacaacgatcgatcgtaatgaagagatgattgccttggctaaggaaaactttgcaaaatatgataatcacaatcagataacccttttggaaggcgatgctgtggatgtgttacaaacattggataaatcttacgattttgtattcatggattctgctaagtctaaatatatcgtttttttacctcaagtattaaaacatttagatgttggaggagtagttgttttagatgatattttccaaggtggagatattgcaaaacctatcgatgaagtgagaagaggtcagcgaactatctaccgaggtctgcaacgtttatttgactcgactttgcaacatcctgatttaactgctactttggtacctttgggagatggtttattgatgattcgtaaaaatgcagatcatattgtactagaagattaaggcatttttaagaaattatgatataataatggagttaatgacaaaaaggagttataaatcatgaaaacaagatcaaaacttgcagcaggctttttgacacttatgtcagttgccacattagctgcctgctcaggtaaaacatcaaatggaacaaatgttgttacaatgaagggcgacactattacagtctctgatttttatgatcaagtaaaaacatcaaaagctgcacaacaatcaatgcttacattgatcctctcacgtgtttttgatacacagtatggtgataaagtttcagataaaaaagtatcagaagcttataataagacagctaaaggctatggtaattcattttcaagcgcactttcacaagcaggtttgactccggaaggttacaaacaacaaattcgcacaactatgcttgtggaatatgctgtaaaagaagcagctaagaaagaattaacagaagcaaactataaagaagcatataaaaactatactcctgaaacttctgtacaagtaatcaaattggatgcagaagataaagctaaatctgtccttaaagatgtaaaggctgatggagctgattttgcaaagattgcaaaagaaaaaacaacagctactgataagaaagttgagtataaatttgattctgcagggacaaccctccctaaagaagttatgtcagcagcctttaagctagataaaaatggtgtttcagatgtggtttcaacggttgattcaacaacttataaaacaagttactacatcattaaagtaactgataagacagagaaaaaatctgattggaaatcttacaaaaatcgcttaaaagaagttattcttaaggataaaacaagcgatagagccttccaaaataaagtgatttcaaaagccttagaaaaagctaatgttaagattaaagataaagcatttgcaggcatcttatcacaatatgctacaacaagtggttcatcatcacttaaaaaatagttgaccaagtcttaaaaagactgtataattaatactattgagaatgaaatttcaacgattagatacagaaaagtgacggttgctgcgagtcatggataatcagaaaaagatgctactcaatggggtaaaactaaaaataaatgagaatgacaagttcattgaatgaaggtggtaccgcggttttcgcccttcgtaatggacttgtcttttgctatttgtcaactttcgaggaggaagagatatggctacttttcaaattaaagaaaaaatgttttctctaggcggtaaatttactattacagacctgactgggcttccctgttatcacgttgaaggaagtttgttccctctacctaagacttttaaagtctttgacgaagaggaacatctcattagtcagattgagaagaaggttttaagttttttaccaaagtttaatgtgacattagccaatgggaatcatttcacgattaagaaagatttctcatttttgaaacctcattacaccattgaagaccttgatatggaagttaagggaaatttttgggatatggatttccaactcttaaaagacaatcaagttatagcaaacatatctcaacagtggtttcgtatgacttcaacttatcaggtagaagtttacagtgaaacttacaacgatttgacaatttcgcttgtcatagcgatcgactatgtcaaagagttagaaaaaaatgcatcaaactaattttaggagagaataatgaaagaattatcgtctgcacaaatccgccaaatgtggttggatttctggaaatccaaaggacattccgttgagccttcagctaacttggttcctgttaatgacccaacgcttctttggatcaactcaggtgttgcaaccttgaaaaaatattttgatggttcagtgattccagaaaatccacgtattaccaatgcacaaaaatcaattcgtactaatgatattgaaaatgttggtaaaacagcacgtcaccatactatgtttgaaatgcttggtaacttctcaattggagactatttccgtgatgaagctattgagtggggatttgaactcttgacaagtcctgaatggtttgacttccctaaagacaagctctacatgacttattacccagatgacaaggattcatataaccgttggattgcttgtggcgttgaaccaagtcacttggtgccaatcgaggataacttctgggaaatcggtgctggtccttcaggtccagatactgagattttcttcgaccgtggtgaagattttgatccagaaaatattggacttcgtcttttggctgaagatatcgaaaacgatcgttacatcgaaatctggaacattgttctctcacaattcaatgctgacccagccgtaccacgttcagaatacaaagaattgccaaacaaaaacattgatacgggtgcgggtcttgaacgtcttgcagctgttatgcaaggggcaaaaacaaactttgaaactgaccttttcatgcctatcatccgtgaagtagagaaattgtcaggtaaaacttacgatccagatggcgacaacatgagcttcaaggttatcgctgatcacatccgtgcgctttcatttgccatcggtgatggtgcgcttcctggaaatgaaggtcgtggttatgttcttcgtcgtcttctccgtcgtgcggttatgcacggtcgccgtcttggcatcaacgaaactttcctttacaaattggttccgactgttggacaaatcatggaaagctactatccagaagtgcttgaaaaacgtgattttattgagaaaatcgttaaacgtgaggaagaaacatttgctcgtactatcgatgctggtagcggtcacttagattcattgcttgcgcagcttaaggctgaaggtaaagacacacttgaaggtaaagatatcttcaaactttatgatacttatggattcccagttgaattgacagaggaattggcagaagatgcaggctataagattgaccacgaaggctttaagtcagccatgaaagaacaacaagaccgtgcgcgtgcagctgttgttaagggtggttcgatggggatgcaaaatgaaaccctagctggtattgttgaagaatcacgattcgaatacgacacatatagtcttgaatcaagtctttcagtcatcatcgctgacaatgaacgtactgaagcagtttcagaaggtcaagctcttcttgtctttgctcaaacaccattctatgctgaaatgggtggacaggttgctgaccacggtgtcatcaaaaatgataagggtgacacagttgctgaggttgttgatgttcaaaaagcaccaaatggtcaacctctacacactgtaaacgttttggcatcactttcagttggaacaaactacacacttgaaatcaacaaagagcgtcgtttggctgttgagaaaaaccacacagcaactcacttgctccatgcagctcttcacaatgttatcggtgaacacgcaactcaggctggttcattgaacgaagaagaattcttgcgctttgattttactcactttgaagcagtaagcaatgaggaacttcgtcacattgaacaagaagttaatgagcaaatttggaacgatcttacgatcacaacgactgaaactgacgttgaaaccgcaaaagagatgggagcaatggcactttttggtgagaaatatggtaaagtggttcgtgtggttcaaattggtaattattctgttgaactttgcggtggaactcacttaaataattcttcagaaatcggtctcttcaagattgtcaaagaagaaggtattggttcaggtactcgtcgtattattgcagttactggtagacaagcttttgaagcttatcgtaaccaagaggatgcactaaaagagatcgctgctactgtaaaagctccgcaattgaaagatgcagcagctaaagtacaagctcttagcgactcacttcgtgatcttcaaaaagaaaatgtagagcttaaagaaaaagcagcagctgcagcagctggtgatgtctttaaagatattcaagaagctaagggcgtgcgcttcattgctagtcaagttgatgttgcagacgcaggtgcacttcgtacatttgctgataactggaaacaaaaagactactctgatgtgcttgttctcgtagcagctattggtgagaaggttaatgtccttgttgcaagcaaaactaaagatgtccacgctggtaacatgatcaaaggattggcaccaattgtagcaggtcgtggtggtggtaaaccagacatggctatggcaggtggtagcgatgcaagtaaaattgcagagttgctagcagcagttgcagaaaatttataagaaacacctctcatttagttagtaaataaaacagacaaagggcagaacatcgttctgttcctttgtgtatataggagaaatatggttggtttaggaacagttatcaatgttattcttattatagttggaggctttgtaggtttatttttgaaaaattttttgaaagaatcacttcaaaagagccttatgcaagccatgggagttgcagttttatttatttcgatatcaggtgttttggagaaaatgatgttagtcgaaaagtcacatctcatctctaatcatacaaatatgatgattattactcttgctctaggtacggtacttggagagttgctatcactagattcgtatattgataaatttgggaactatcttaagcaaaaaacaggaagtggtaacgatattaaatttgtggaggcattcgtcacctcaacttgtaccgtttgtattggagcaatggccgttgttggtagcattcaagatggtatagcagcagatcattcgattttatttgctaagggaatgttagacatgattattattgcaattatgacagtgtctttagggaaaggagctctattttctgcacttcctgtcgctttactacaaggtagccttacgattgttgcttttttcatggggagtctacttaatccatcatctttagattaccttaacttagtaggaaatatgcttatattctgtgtcggtgttaatttactctttaacctaaatattaaagttatcaatatgttgccagcaattattttagctatattatggggaagttttatataaaagataaccaagttttaactcaaacttggtttttctttagacatatgttaggatgaaagaagatatactacggagaggatccaactcatgaatctattattttctattgatgatatgtacgtagatcattttaaagtgatgctttattcgcttgtccgacaaaccaagaatcgtaagttagagatatatgtcttacaaaaaacattactcaaacgtcatacagaacttattcaatatactcaaaatttagaagttggctatcatccaataattgtaggtaccgaagtatttgctcaggcacctacaactgatcgctatccagatacaatatattatcgacttttggctcataaatttttacctgagaccttagataggatactttatttagatgcagatatgctttgcttaaatgatttctcaagtttatatgatatggagttaggtgatcaactatatgcagcggcaagtcataatactgatggtaagtttctagattatgtcaataaattacggttaaaaaatgtagagctagaatcctcttatttcaatacaggggtactcttgatgaacttgcctgctatacgaaaagttgttcatcaacaaactatcttagattacataatgcaaaaccgtggtcgtctaatcttaccagatcaggatatcttaaatggcttatacgctaatttggttaaaccaatacctgatgaaatttataattatgatgctaggtatagtcttatttatcaattaaaaagtcgcaatgaatgggatttagagtgggttattaaccatactgtttttttacattttgcaggacgagataaaccatggaaaaaagattatagaggacgttactcgggcctttataagtttatggctaaagaggctttaactaaaaattgaagatttaaaaggttactaaattatttctatttagtaactttttttggggtgatattttaatgatatcaataatctttgctaataattatttataaaaaagaaaaataatatcaaaggaggagcgtgttaaaatcacttaatcattgaacaatcaaattaatcattgtttcaaaagcataatggttttaggagttactcaaatgaaaaaggaatttattattacaggtcggatggttgcaagagttatggaaaccctagtttgcttatgtatggtaagtaatcttgttcttgatatgcttgatataatagaaataaatgaaattgtattttgtgtgttggtagcatcaattgcagggcttgagttttgtttgcaaaaagaaagggagtagatagatggaattgtttggcttaatggctttttatggtcatgacgtatattggtgtacctaaagagcaaaaggcactcagtcgtaggggtaaacaattagaaaaaataaatcagggaggaaaaacacttatgtcacaaatgattcaagatttagtaggaagcacatgtatgatttatttagaggatggttctcaaactcatccttatgagattttaaaggtagatgaggattgggtacagattcgtcgcaacttgaaacgaagtaaagaggaggtgcgtattgtccgtattcatgatatcaaggaattgcgtccagtcaataaatagagcgaggaataaatctatatatcattttataaaggagaaaaatgatgggattaattttaaaaaatagactcaaagaattgcgtgcacgagatggtatcaatcaaacagaactcgctaaattaacaggagtctcaagacaaacaattagcctaattgaacgcggagaatatacgccatctgttattattgctatgaagatttctcaagtatttaaagaatccctagagaatgtttttagtttagtgtcaatggaggaataatgatgaaaaattttataaaacaaagtgatactacatttgttcgaattatcaaaagtcttttaattggtggttttataggggccatacttggttccgtaggagctctttttatcatatttggtcaagataagtacttatctgaaattaatattgttcaatatttcctatgggttagtcgtattgttgtaattataacagctctctttagtctcatctacctctatcagattcaaaaatatcagaaagtttttttcaatgttgatgaaagtcaatctgaagaaatttatcgccagattaatttaagacattcttatgggatgacttttgtgtcaatttcaatagtactcagtatagttaatactttatttaactataaactaaatatttttgatgattcagttactttagttattccaatatatgatttatcactgctatttgttttattgggtttacatatatattttttaaaggtatatcggaatatccgaggtataaaaatgacagtcgctccaactttaaaagagttgaaaaacaatgtcttacaattggacgaagcagagttggaatcaaattataagatgtgttttgatattgtcatgaatttaagtggttttattttccctacgatctattttgtattattctttatctcatttgtttttcaaaaagtggagattgtagcaattattataacaacatctattcatatctacattctcattaagtctttaaaagcagcacgtcatttttatagatagtagtagctagattttttatcaaaaaacttatattagtgtaaaataaaaggattgattctctgaaaatcagtccttttattttttctatttcttaggtaaaaagaagctagggtagctgataactaaaataataatactaatgactacaaaaaatagagttaacaaaccagcagtaccattgacgcttaatgagtataatgtagcagacataccttttggtgcataactagcccaaaaaataacaccagcgatataatgccaaacataacgaacaagtgttgctaatattgctccagataatgctaatgataaagctttagttttagagctgctgctaagtgcatctttaaatttagcagaaaatacgcctgcaagtcccatacttataaatgctaagatgtattctataaaaacttgggataaactaaggtaatatactttggaaagaacaaagtgcaataagccccaaattaagccagcaaatagaccgtattttgtaccacgacgtaatgcaaaaagtatcagaggaattgctccaaaagagggagtgaaccatgacgcaaaatcaggaatcattgataaagccatagcaagcgctgcaaaaatagcagtttcaataagacaggtagtgttgttattttttgacataaaaaatctcctttttttatacagcaaaggagattcttttgtcatttgtcatgtttaaccaattcaaaccacaattcctacgctcgtcctaacgagatcaggttagaggattttgcatatctgcaatctcagctcaaggcactcccttgtgtatttactctaacattctatcttgaaagggtttgcttgtcaagaaatttgtatttaactagaaaaagacactaaatcagtgtctttttcttataatccatagttatagtcatcatcatgcatagcttcaacgctaccaagtaggtaaccattacctacttgagagaagaagtcatggtttgatgttcctgttgaaataccattcataacaattgggttgacatcatttgctgtatctgggaataaaggatcttgtcctaaattcataagagctttattagcattgtagcgtaaaaaggtcataacttcttcagtccatcctacgccatcataaagtgtcttggtgtatttttcttcgttttcatacagctgataaaggaggtcatacatccaatcacgaaaattctcttgctcatcttctggtaattcgttaaaaccaagctggaatttgtaaccgatataagtaccatgtacagattcatcacgaataattaatttaatgatttcagcaacatttgctaacttattatttcccaaatagtaaagaggtgtgaaaaagccagaataaaaaaggaaagtttcgaggtaggtggaagccacctttttttgaagggcatttccattagcataaatgtcattgataatacgtgctttttcttgaaggaactcattattattagtccactcgaaaatttcttcaatttctgatttagtatttaaagttgagaaaattgaagaataagatttagcgtgaacagattccatgaattgaatattgtttaagacagcttcttcgtgaggcgtgcgaacatcggcacgaatagcttcaacaccagtttctgattgcatggtatcaagtagggttaagcctccaaaaaccttgccaacaagatctttttcttgagcagaaagtttgcgccaatcgtctaagtcatttgataaagggatacgtgtatcgagccaaaattgttcggttagtttttcccaagttgatttatcaataacatcttcaatttcgttccagtttatagcttcgtagtaagttgtcatggttttctccaatggtaaataggtttttatataatgatgatggaagaagagtagaatatagaattctgatctagcaatatttcaagtattatcgatttttagaaaaataaagatgaaaataccttagaaaataagataacatcatgaaactgagatagtttatctcagtctagtttctgatgttttaagtagagtttcttcgttagatgacacaactttcgcattgattagctccgacttcgctaccatcatctgtaaaagtacggatatagtagattgatttcacacctttgttgaaagcatagttgcgtaggattgaaaggtcgcgagtagtctgcttactttctgttttccactcgtacaactcctttggtaattcgcttcgtaaaaagagtgtcattgagagaccttggtctacgtgctcagttgctgcggcatagacgtctattactttacgcatatccatatcataggcagaagtgtaataagggatagtatctgtagctaagccattagctggataataaattttcccgatttttttctcttgacgctcttcaatacgttgtgtaatagggtggatagatgctgaacaatcgttgatatacgaaatagaaccattcggagcaactgcaagccgattttgatgatatagtccgtctttcataactgcgtatctaaggttttcccaatctttagcttcggggataaaatgattagcaaatagggattttactttgtcagattgtggaacaaattttccagatacatatttatcaaagtatgtaccgtcagcgtattttgatttttcaaaacctacaaatgttgtttgacgttcgcgggcaatattgtttgattctactaaggtccagtagttcattagcatgaaataaatatcagtaaattcaattgattctggactaccatattcgatatgattttttgccaaataggagtggagtcccattgctccaagtccaaatgtatgtgcttgagcatttccgtttttaatagttggaacagcttcaatatttgatgagtcagtaacgaaagttaaagcacgagtcattgttttaattgattttccaaaatcaggagatgtcatcatatttaaaacattagttgagccaaggttacaagaaatatcagttcccatttcaaggtattcttgagcatcattgataagacttggtttttgtacttgcaaaatctcagagcaaagatttgacatgataatttttccatcaacagggttagtacgattagcagtgtcaatattgatgatgtaaggataacctgattcttgttgaagtttagaaatctctgtttctaaatcacgagcattgatttttgttttagtgatattagggttagcgactaattcatcgtatttttcggtaatatcaatatagctgaaaggaacaccatattcacgttcgatactataaggactaaacaagtacatttcttgattgttacgtgctagttcatagaatttatcgggtacagtaatccctaatgacaatgttttaacacgtactttttcatcagcattttcttttttagttgataagaatgaaataatatctggatggaaaacgtcaaggtaaacaactccagcaccttggcgttgtccaagttggttggagtaagaaaaactgtcttcaaataatttcatgactggaacgactccagaagcagcaccagcaaaacctttgataggagctccagcctcacgaaggttactaagtgatattccaaccccaccaccaatacgagataattgaagagctgaattaatcgaacgaccaatagcattcatatcatcagttacttggattaagaaacatgagactaattctccgcgacgacttcgaccagcatttaaaaaacttggtgttgcaggttgatagcgttgtgaaatcatttctagagctaagtcagttgctagttcttcatcaccgtctgcaaaataaagagcgttaaagagaacgcgatcttcaatactttctaaatagtattctccatcatttgtttttaatgcatactgctgataaaacttataggctgccatgaaggatttaaaacgaaactttttatcgaagagtttggtagataattcttcaataaattcaggacgatatttattgaggaaagcttcttcaagataatcatacttaaggaggtaagcaattttatcagtgattgagtcaaaagcttttgaattaggctgtacgttttctttgaaaaaagcagttaaggcttctttatctttatggagtgggatttgtccattaacaggacggttaatttcattatttaggcgaaagtaagatacatcgccaatattttttaaactcattgaatttatcctcttaacttaacaatacaaaatgggaataaagcaattaattgctttattcccagactctaatttgcttaaacaagttcttttagtttgcttggttggaaacctgaaaaaacaacattaccagcttcaatcactggagccgcagaaaagccgagatttttcacatattcaattttttctggtttttcatcaatattaatttcttcaaaatcagcgccgtgctggtcaagaaatttcttagtcattttacattgcatacagttgtttttcgaaaaaacagtaatagctgccatgttgtcctcctaatttttttcatggtaatagcatataaaaaaagaatggaaaaagcaagtgttttatttctaacaaaacacaatatatagtgtcttaaaataaaatgagacactatatttcgttttttagggttagtttaaaagctttcagcctgttttccaattcctttcagaagaacataaaaaaatcatttttagaattctatttttaaattctaagactctcatttttaatatgaaaagctgtggaaaacattcaagtttttttctgtttgagacatttaatcttgaaaaataaaaagcaatatgttatacttttaacttgtaagggttaccaataggtgactcaaatatttacaaatgacaaaaggagaaccataatatggcttcaaaagatttccacattgttgcagaaacaggtattcacgcacgtccagctactttgcttgtccaaacagctagcaaatttgcttcagacatcacgcttgattacaaaggtaaagcagtaaaccttaaatcaatcatgggtgttatgagtcttggtgttggtcaaggtgctgatgttactatttcagcagaaggtgcagatgcagatgatgcaattgcagctatcgaagaaacaatgacaaaagaaggattggcataagaaaatgacagaaatgcttaaaggaatcgcagcctctgatggtgttgcagttgctaaagcatatctacttgtccaaccggatttgtcatttgagactgtaacagtcgaagatacaaacgcagaagaagctcgccttgatgttgcactccaagcttcacaagacgagctttctgttatccgtgagaaggcagtagaaagcttaggcgaagaagccgcagctgtatttgatgctcatttaatggttctttctgacccagaaatgattaatcaaattaaagagactattcgtgcaaaacaagtaaatgcagaaacaggtcttaaagaagtgactgatatgttcatcactatctttgaaggtatggaagataacccatacatgcaagaacgtgcagcagatatccgtgatgttgccaaacgtgtcttagcacatcttttgggtgttaaattaccaaacccagcaactatcaatgaagaatcaatcgttattgcacacgatttgacaccttctgatacagctcaattaaataaacaatttgttaaagcttttgtaacaaatattggagggcgtacaagtcactcagctattatggcacgtacactcgaaatcgcagctgttcttggtacaaatgatattactgaacgtgttcaagatggtcagttgattgctgttaatggtattactggtgaagttatcattgaaccaactgaagctcaaatttcagccttcaaggcagcaggtgaagcttatgccaaacaaaaagctgaatgggcacttcttaaggatgcacaaacagttactgctgatggtaaacattttgaattagctgctaatatcggtacacctaaagatgttgagggtgttaacgaaaatggagcagaagcagttggtctttaccgtacagagttcttatatatggattcacaagatttcccaacagaagatgagcaatatgaagcatataaagcagttcttgagggtatgaatggtaaaccagttgttgttcgtacaatggatatcggtggagataaagagcttccttactttgatcttccaaaagagatgaacccattcttaggattccgtgcattgcgtatttcaatttctgaaactggtgatgcaatgttccgcacacaaatccgagcacttcttcgtgcttcagttcatggacagctacgcatcatgttcccaatggttgctttgcttaaagaattccgtgctgctaaagctatatttgaagaagagaaagcgaacttgttagctgacggtgtagcagtagctgaaggcattgaagttggtattatgattgaaatcccagcggcagctatgcttgcagaccaatttgcaaaagaagttgatttcttctcaattggtactaatgatcttatccaatacacaatggctgcggaccgtatgaatgagcaagtttcatacctctatcaaccatacaatccatcaatccttcgtttgattaacaacgttatcaaagctgctcatgctgaaggtaaatgggcaggtatgtgtggtgagatggccggtgatcaaactgcggttccacttcttgttggtatgggattggatgaattctcaatgtcagcaacctcagtacttcgtacacgtagcttaatgaaaaaattggacacagctaaaatggaagaatacgctaatcgtgctctttcagagtgttcaactatggaagaagttatcgaacttcaaaaagaatacgttgactttgactgagaataataaaaaagtagggattaaaaaatctctacttttttattgaaagtttggatattgttaagtttctaagaaaaatatgtcagataattgaaataaatagataaagtgatagaataaacctattacaatgtaaaaggagatttactttgacaaaagaatatcaaaattatgtcaatggcgaatggaaatcatctgttaatcagattgagattttgtcaccaattgatgattcttcattgggattcgtgccagcgatgactcgagaagaagttgatcatgctatgaaagcgggtcgtgaggctttaccagcctgggctgctttgacagtatatgaacgtgcacaataccttcataaagccgcagacattattgaacgtgataaagaagaaattgctactgttttagcaaaagaaatttctaaagcttacaatgcttcagtaactgaggttgtaaggacagctgatcttattcgttatgcagcagaagaaggaattcgtttatcaacttcagctgacgaaggtggaaaaatggatgcttcaacaggtcataagttggctgttattcgtcgtcaaccagtaggtatcgttttagcaatcgcaccttataattaccctgttaacctctcaggatcaaaaattgcgccagctctaattggtggaaacgttgtgatgtttaaaccaccaacacaaggttcagtctcaggacttgttttagcaaaagcttttgcagaagcaggtcttccagcaggtgtctttaatactattacaggacgcggttctgagattggagattacattgttgagcatgaagaagttaattttattaactttacaggatcaacgccagttggaaaacgtattggtaagttagcaggaatgcgtccaattatgcttgagttgggtggtaaggatgcaggtgtcgtcttagctgatgctgaccttgacaacgctgctaaacaaatcgttgcaggtgcttatgattactccggacaacgctgtacggcaattaagcgtgtacttgtcgttgaagaagttgcagatgaattggcagaaaaaatatctgaaaatgtagcaaaattatcagtaggtgatccatttgataatgcaacggtgacaccggttattgatgataattcagccgactttattgaaagcttagtagtagatgcacgtcaaaaaggtgcgaaagaattgaatgaatttaaacgtgatggtcgtctattaactccaggattgtttgatcatgttactttagatatgaaactagcttgggaagagccttttggaccaattctcccaattattcgtgtcaaggatgcagaagaagctgttgctattgccaacaaatctgattttggattacaatcatcagtctttacacgtgatttccaaaaagcatttgatatagcaaataaacttgaagttggtacagttcacattaacaataagactggacgtggtcctgataatttcccattcttaggactcaaaggatctggtgcaggtgttcaaggtatcagatattcaattgaagcaatgacaaatgtaaaatcgatagtttttgatatgaaatagacgtaaaacgactcaactattgtcagttgagtcgttttataaacctcttttacattaaaaataaagaattatataatcttctaaagtggttttatttttgtgatataattgtcataaaaaataacaaaagagtcattatatgaagaaattaattataggtatttttagtctaattattatagcgattcttgcttggcaaggtttttcgtttttgaaacataaagaaataaaacttcaacaagctgttgttgaaaaagaaattcgcatagccgagaaaacggtagaagtggtgaaaagacagaaaactgaacgtgttctttttcttgaacctaaaggatatgacaaaagtctaagcgctgatattttaaagtggaatcaaaaaagctttgagcataaaaaattttatgacaatcaatacattattctacgtcctcaattagcagattctaactttgcaaatgttaaaaaattatccatttatcaaatcttatatcaaaaagaaaaaggaagtatgtttcaaaaatcaagtcgccttttgagaacctacttacttgatcaaaataagaaaccttttgaattagatgagcttttagctcataatatatctggatttaaggctattttagaaaatatagctccaggaactcaactaaaggaacatgatagcaataaagaatttttaaaaactggaagagtaacagatgggctagatgttaaagatggtaagttaattattaatgatttaaaattaccacttgataaattatataatgtgatcgatgagtcatatttaaaatcaagtgatctagatttagtttctaatttaaaagctaaagcaccacgtgttgcacttacctttgatgatggaccaaatgaaaaaacgactcctaaagccttagaaatccttaaaagatataatgctaaagcgactttctttgtaatgggacaaagtgctgtagggcacacagatattttacaaaggatgcatgctgaaggtcatgagattggtaatcatacatgggatcatcctaatttaaccaaactaccagcggagaaaatcaaggaagagattcataagactaatgatctgattatgaaagcaacaggacaaaaaccggtgtacttacgtcccccttacggagcaacaaatgctactgtaaaaacagtgacaggattgaaagaaatgttgtggtcagttgatacagaagactggaaaaatcataatacacaagcaatgatgaccaatatcaaaaaacaattacgtcctggaggagtgattttgatgcatgatattcaccagacaaccatagatgctctgcctacaattatggattatctgacaacccagggctattattttgttactgtaggtgaattatattcaacgccttaataaaaaaagaaacaagttacttgtttctttttttattttaaatgtaatttttgattgtgaagtacaagttctgtaacggtggcgtattttttaagttgtttgagctcttctttatgtgttacaaatgtaataacacatccctctttccccatacgaccagttcgtccagaacgatgtgtatatgtttctttgtcgcgtgcgatatcaaaattaatcacatattctaggttgtcgatatcaatgccacgagctaccaaatcagttcctaggagtaatgaaatatcatggtttttaaatttctctaagataactttacggaatttaatattaatatcgcttgctaaagaaactgccgaggccctattaaattgtaaacgttcttcacatgcacctaagtctgataagctgttaaaaaagacaagacctctaaaatcaggaatatttgaaaatttacgaagtaggtcagtacgctctcttttatcaactgtaatataataatgttttatagtatcaagtttttgattagatagatcgattgttatagtgttatcggcaagtttactattgtccagtttgttggtggcactaatgtaaatcatttgctgatcacgaggaacgcgattaataatattgtccacaaaatgatattgtgagtcgccgagtaattcatcgaattcatcaaggacgatagtattaatgttcatcatttttattttttttagtttcacaagttcaaatacgcgtccagcagttcctataagaatttctggtcctttttttagtcgctcaatttggcgtttttgactagaacctgaaaggaatagttgtgcggtcagtcctaatggttcagcccattcttttgtaacgtcgaagatttgtccagctaattctgaatttggagctaaaattaagagttgttggctctttttaggttgcaacttaagaagcgttgggaaaaggtatgctagagttttaccagtacctgtagggctaattccaaggatattatcaccatcagtaataggttgaaaaagtttattttgaatatctgttagatcatcaaattgacgctgggttaatttatcctgccattggtctggaaattttgttatcataagaatcctcttgttattttatatattatcattgttattataacatgctttttatttttagagcgttttcaataaaatttagactttaaaaaaaataagtttatagtacaatagatagaggataaatttaatttggagtgacaaatgcgtaaaaaacctattattattggtgttacaggtggatctggtggtggtaaaaccagtgtttctcgggcgattttatcaaatttcccagatcaaaaaattaccatgattgaacatgattcttactataaagatcaaagtcatttaacttttgaagaacgtgtaaaaaccaattatgatcatccccttgcttttgataccaatttgatgattgagcaattgaacgaattgattgagggacgtccggtcgatattccggtttatgattacacaaaacatacccgtagtgatagaactatccgccaagaaccccaggatgtcattattgttgagggaattttggtattagaagatcagcgtttgcgtgatttaatggatatcaaattatttgttgatacagatgatgatattcgtattattcgtcgtattaagcgtgatatggaagagcgcgatagaagtttagatagtattattgaacagtatacagaagttgtaaaacctatgtatcatcaatttatcgaaccaacaaagcgttatgcggatattgtaattccagaaggagtaagtaatattgtcgctattgatttaatcaataccaaagtggctagcatcttaaatgaagcaaaataaacacaatggtttgtgtttatttttttgttttatataggatggttatttagttttagtaactttcaaattatgctataataagtgctatgaacaagtctaagaaaatcgaaaattatcaattattattactacaagcgcaagctctattctcagatgaaacaaatgctcttgccaacttatcaaatgcttcagctatgctaaatgctatgcttccaaattctgtatttacaggcttttatttatttgatggagaagagttaattcttggccctttccagggtggtgtatcatgtgtgcatattactttaggaaaaggtgtttgtggtgaatctgcacaaactgctaagacgctgatcgttgatgatgttacaaagcatgctaactatatctcctgtgattcaaaagctatgagtgaaatcgtagtacctatgtttaaaaatggcaaacttctaggagttctagatttagattcttctttagtagcagattatgatgagattgatcaagaatacttagaaaaatttgtaggtattctagtagaacatacgatttggaatttggatatgtttggagttgaaaagtaatgtatcaggccctttatcggaaatatcgtagccaaacatttgatgaaatggttggacaaagtgttatttcaactactttaaagcaagctgtgtccagcaaaaaaattagccatgcttaccttttttcaggacctaggggaactggaaaaacaagtgctgctaaaatatttgcaaaagcgatgaattgcccaaatcaaattaatggcgaaccttgtaatcattgtgatatttgtcgagatattacaaatggtagtttagaggatgtcattgaaattgatgctgcgtcaaataatggtgtcgatgaaattcgtgatatcagggacaaatcaacttatgctccaagtagggcaacctataaagtttatattattgatgaggttcatatgttgtctacaggtgccttcaatgcactattgaaaacacttgaagagccaacagaaaatgttgtttttatattagcaacaacagaactccataaaatccctgcaacaatcttatctcgtgtccagcgctttgaatttaaagcgattaaattattagctattcgagatcatttagcacagattttagataaagaagctatttcatatgatttggatgctctgacactagtcgctagacgagccgaaggtggtatgcgtgatgctttatcaattctcgatcaagccttgagtttagcgaaagataaccacatttctttagatgtagcagaagaaattacagggagcatttccttatctgctatagatgattatgtatcgaatatattggctcacgatacaactgaagcactcgctaaacttgaagtaatctttgatagtggcaaaagtatgagtcgttttgcaacagatttattgatgtacttaagagatttacttgttgttcaagcaggtggtgaagatagtcattcaagtgatacttttatagccaatcttaatgttaaacaagatattttatttgaaatgattgataaagtgacatctgttcttcctgagataaaaaatggtagccatcctaaagtttatgcagagatgatgaccatccaattgtctgaaatggtagaaaaaaattcgtcaaacatacccgcagatgtgacagcagaattagatagtcttcgtcgagagttaaaatcgttaaaaaacgaaatgagccaactctctcgagcagatcaaagttcatcaactcaaaaagtaaaggttaataataagacattcacatttaaagttgaccgtacaaagattttgaccattatggaagaaacggttgtagatagtcaacgttcacgtgaatacttagaagctttaaagagcgcttggaacgagatattagataatattacggctcaagatagagccttattaatgggatctgaacctgtcttagctaatagcgagaatgctattttggcatttgatgcggcctttaatgctgaacaagctatgaaacgtaccgatctcaatgatatatttggtaatattatgagtaaagcagcaggtttttcacctaatattttagctgtacctagaaatgattttaatcaaattcggagcgattttgcaaagaaaatgaaagctcaaaagacggaaacagaacctgaagttaatcatcaaattccagaagacttttcttatctagcagaacgaatagcaatcgttgaagattaaaacgtaactaaaaatagttgcctgttacaggcaactatttttttgataagttttttaattatttagtagattctgttataatggtgatatgacaaaacgacaatttatttttatggcgcttttatgctcttttgaaacttatttttttaatcaatccgttatggatggctcctggatttttgctattttttggggagttttattacttcgagatcttcaaaaggtgtatgcgatttcaaaattcacaaaagagcttatcaaatctaccaagaagaaagactgatttcgccactgcgaagtgttttcaactgaccatcatctaactcaaccactaaatatcctttatctgtaatatcaatagctttcccagaatacattgtttgaccatccataaagctaacggttctatctaagactagggatttttctctatatacctttaagtgatcctctagtggaatattgaaaaagagattccagatttctgtaatcaattgatttctagttatggtcggttgctctgtaaagagactacctgcgcgcttagttaacgccctagggaactctttgatatagaaattgatacctaatcctataataacattcgttaccaacccactctcaacagaagcgatagcctcggttaaaataccagctatttttttattatctaaataaatatcattgacccacttaatttcaggagtaattcctgttaaccgtgagatagcttttacagcactagaggctaccatgacagtataaggttttatatcttcaatcggtacattaggttgtaataaaagagacatatagatgccgccttgatttgatgtaaagaaaggtctatcaaaacgtcctttagcttttttttgattaggagctaaaaaaaggtgtggagtctttaatttactttctatccccattttagcatctagttgggttgaagcactattattattaagactaaccttaataccaatttcttgttcgagttgttctggtaataatatgtcacctgataccaatcggtagcccttgttagtgacagactcaatctctaggcctaattcttctaacgtttttatacctttccaaatagctgtgcgggaaatattaagttgatttgccatagtttctccgctaataaagttgttattttttgatagtatttgataaattttttcgtaggttttcataaatctagtatagtataaatcgagaaaaaagactaaagaaaatagagatatttttttatttattggtaacttatttcacaaaagatgaaatagtggtacaatagctatatgagtcccgaaaaggtagcctagaggctagttctttgtaactcgacacattttacattttaggggggacatttttatgtcagaacgtaaacttttcacgtctgagtcagtatctgagggacatcctgataagattgctgaccaaatttccgatgcgattttagatgcaattttagagcaagatccagatgcccacgtagcagccgaaacagctgtttatacagggtcggttcatgtatttggcgaaatatcaacgacagcctatgttgatattaaccgagttgtccgtaacacaatcgctgaaattggctatgataaagctgaatatggcttctcagctgaatctgttggagtgcatccgtcactcgttgaacagtcgccagacattgcacagggagtcaatgaagctcttgaggtacgtggttctcttgaacaagatcctttagatttaattggtgcaggtgaccaaggtttgatgtttgggtttgctgttgatgaaacacctgagttaatgccattgccaatttctttagctcatcagttagttaagaaattgacagatctacgtaagtctggggaactcacttatcttcgaccagatgcaaaatctcaagtaacggttgaatatgatgaaaatgatcaaccaattcgtgtggatgcagtagttatttcgacacagcatgatcctaatgtaactaatgaccaactccataaggacgtgattgagaaagttatcaatgaagttattccaagccattatttagatgaccaaacaaaattctttatcaatcctacagggcgctttgttattggaggccctcaaggagattcaggactaacaggtcgtaagattattgtagatacttatggtggttattctcgtcatggtggtggtgcattttcaggtaaagatgctactaaagtagatcgttcagcatcttatgcagctcgttatattgcaaaaaatattgttgcagctgatttagctaaaaaagtagaagtacaacttgcttatgcaattggtgttgcccagcctgtctctgtgcgtgtagatacatttggaacaggtgttatagcagaagcagacctagaggcagctgtacgtcaaatatttgatttgcgaccagcaggcattattaatatgttggacctcaaacgacctatttatcgacaaacagcagcctatgggcatatgggacgtactgatatcgatttgccatgggagcgagttgataaagtccaggccttaaaggattttattgctagcaaataataaaaagcgtaaacgaaagtttacgctttttttgctcatgataatttatagaacatttataaaatcttataataaactggttaagtataggaaatactgcatatttcttgaaaatatggtgtatattgtgaataaaatgatggccaagttaattgaattttcctatcgaaaaatttttcaaaaaaataatttcacactcaaatcatttgattatcaaataaatatagcctttataaaaatattatataagtataaaatgtaaaaaaaataaaaaaatgatatttttatttgatttaaatgtatttaataaaaatacaaagtttctaaaaaaagtaaaaattccatctcgacaaacagcgttagttattataaccgaacattattgtccttaaagcatgaaaacaaaaacaaaagttcgtaatttaattgatttgccatgttactaatcttatgctaatatattatctcgtgataagtttttgatgtaaaaattatcatgaaaaagaaaagagagatggaaatgaaaaaacaatttttaaaatcagcagcgattctatcgctagcagtaacagcagtatctacaagtcagccggtaggggcgatagtgggaaaagatgaaacgaaattaagacagcaacttgggtatattgattcaaaaaaatctggaaagaaaattgatgagagatggggtgaaaaaatttataactatctaagttatgagctcattgaagcaaacgaatggattaaccgaagtgagtttcaggaacctgagtatagaactattttatcagaatttaaagataaaatagatagtattgaatactacttaattaacttaagtaatattgctaaagaagatgcgcatcaaagaaatattcttcaatcattagataaatatgaaaaaagtggaatatataatttagaccaaggtgtttataattatatatatcaagaaattagttcagcgaagcacaagttttcggatggggtagataaaatttatcgtttagatagtactttatttcctttctctgtatggtatgataaacatttagataataatgataactacaaggataataaagattttaaagagtacattgctttattaaatgaaattacacgaaaagcaaggttaggatatcaaattgtaaataaccataaagatggggagcataaagatgaagcagaaatactggatattttaatcagagatataacttttgtttcaaaagatgctcctggatataaatatattccaaataaaagaattgcagcgaaaataattgaagatttagatggaattatcaatgacttttttaagaatacaggaaaagataagccttctcttgaaaagttaaaggacacagaattccataaaaaatatcttaattcaactgaaccgtatagtattgaaactaacttaccttcaaattataaagaattgaaggaaaagcaaataaaaaaattggaatatggatacaaaaagtcttctaaaatttatacgtctgctcattatgcactatatagtgaagaaattgatgctgcaaaagaattgcttcaaaaagtgaagattgcaaaagataattataatgaaattaagtccatgaatctaagcccttcaatttttaatcagtatttacaacttcttcaaatagttataagttcagagataaatctaaaaaaggcactcgataacactgtggatttacccatagaaaataattttaatacattggacattcaatataataaattagacactgctattaagtcacttcgaaaatttgtaactaagtataaacaagaagtaagaaaagctactaagagttattctaaaaaagaattagtaaatgcagagttaacaaaagtaatttctaatgacaatattttattagacatgcaagcaattagttccaattatgggtctactaaaaagtttgtttattcagtcaaaagattaccttacgtcccgcaagtaattatgacaacaacgtctaatgtacttatgcctcaaaagcaagttgaaaaagtgaagctactcaccccatttacaatttctaataaagaagtattgaatcatgactcactagtagaaaatgatgctcaaaaacaaaaagtagaacaggaaaaaactaaatcgctagctcctcaaaaaggggctgtaaaagaacaaactgagcaaaaagtatctggaaatactcaagagatagaaaagaaatctgaaactgtggcaactccacaacaaagttcagttgcgcaaacttctgtccaacagccggctccggttcaatcagttgttcaagaatccaaagcttctcaagaggagattaatgcagcacacgatgctatttcggcgtataaatcaacagtcaatattgctaatacagccggtgtaacaactgcggaaatgaccacgctcattaatactcaaacttctaatctttctgatgttgagaaagctttaggaaataataaggttaataatggtgcagtcaatgtattgagagaagatacagctcgtcttgagaatatgatttggaatcgtgcttaccaagctattgaagaattcaacgtcgctcgtaatacttataataaccaaatcaagacagaaacagttccagttgataatgatattgaagctattttagcaggttctcaagctaaaattagccatttggacaatcgtatcggagcgcgccacatggatcaagcttttgtagctagtttattagaagttactgagatgagtaaatcaatctcatcgcgtataaaagagtagacactgctatcaaggcgatcttaaacttttgtattaaactaacctaaaagatagaaagagactaatatgaaaaaaataacaactttaatcttagctagtagcttattactagttgcaacgacatcggttaaagctgatgataactttgaaatgccaacgcgttatgttaaaatgagtgaaaaatcaaaagcattttatcaaagactacaagaaaaacaacgtaaggcacatactactgtgaagacttttaataattcagaaataaggcatcaactacctcttaaacaagaaaaggctagaaatgatatctacaatttaggcattcttatttctcaggagtctaaagggttcatccaacgtattgataatgcctattctttggaaaatgtctcagatattgttaatgaagctcaggctttgtataaacgtaactatgatttatttgaaaaaatcaaatctacacgtgataaggttcaagtcttacttgcatcgcatcaagataatacagacttaaaaaacttttatgctgagttggacgatatgtatgaacatgtttatctcaatgaaagtagagtggaggcgataaacagaaatatccaaaaatataattagtttctaaactaacaaacattcctaaatataagacataaaaccctactcattgattagtgagtagggttttactgttttaaatagctttctgatcagaatgtaagccttgtcatttcaaaggaactatgttattattcttaagtaaattaaataggacatttggggtgcgtaacagctgagattatacccattgaacttgatgcagttagtactgtcgaagggaaatgtgtgccattacaagttttttgtggtggaaaagggcgtagtgtcttcttagtagacagctagctctagttaatcagataataaactccgtttgcttgcagatggagttttttgttgtcaaaattttttgtaggttgttgccccttatctgtcatagagaaggagttatgatgactaatcataaaacaaaaaaattaacggttttagcaattatgattgctttagatgtttttttaacgcccatttttagaatagaaggcatggcctttatgtctagtgtggttaatattatcgctggagttataatgggaccaatctatgcattagttatggcacttgtaacggcttttattcgtattttaactcaagcaggagtagcatctgttgcacctttagctattctaggagctggtccaggagctttcttagcgggttggttttatcggttttatgcgaaagactggatgtcttgggtgggtgagtttataggaacagggataattggagcacttttatcagctccaattatggtctggttttggacttggacagcggatggaaatcacgaagtgttagctaaagcatctgcagctcaatccatttttctttttatgccaaggtttataggggcgactataattggcggtgttattgctttgttgctacttcagggattaaagcgggttcctgtatttatgacaatacaagcattatttaaaggagaaaaagtaaaatgaaattgagtttaaaagatgtattattgattgctctattagcggttgttctgggcgttgtttactttggagcaggctatatttcaaatgcttttgtaccttttgtaggccctatagcgcatgaagttatttatggtatttggtttgtggcaggtccaatggctctttatatattgaggaaaccaggaaccgctattgtagcagaattgttagctgctttgatagaggttttaattggatcaatttatggaccaagtgtactcgttattggtacccttcaaggtttagggtcagaattaggctttacactatttaggtatcataattacaagttgccagcttttatattgtctgctattttgacatcaatttttagttttgcatggagtttttatgccaatggacttagtgcgttttcattttcatataacattctgatgcttatagtaagaactgtttcatctattattttcttcttattaacaaagaatatatgcgaccaattgcatagaagtggtgtactgaatgcttatgggattcatgaaaggaagtagcctatgctatctgttgaaaaattagcttgcacccatggcgatagtcattatttatttgatgaagtgacttttagtcttaacccaggagaacgaattttaatcagtggctattcagggtgtggtaagagtacattggctcttttactatcagggttaaaagaaagtgggaaaggtcaagttttattaaacggctcattaatagaaccaagcgatgtggggtttctttttcaaaatcctgatttgcaattttgtatggatactgtggcgcatgagttgtattttattttagaaaatttacaaatagaaccggagcaaatgcaagatagaagtgagtttgtattggcacaagttggtttaaaaggatttcagaatcggttgatttatactttatctcaaggtgaaaaacagcgattagcattggcgaccatttttttaaaatctcctaaacttattattttagatgaagcttttgcgaatttggatcaagagagtgccagtcaactattacaattagttcttaattatcaagcaaacaatcaatcaatgctgattgtaatcgatcatttgattacttattatcaagatataatggatcactatttttggttggaaaaacggttgacaagggtcaattttgattatatgctcaatcgtttgaatgtcttcgaattagaaaagaaaagtcataatacaggtgacaaactgttatcaattaaagatttccaagttaaactttcaaaaaacaaattcatctcttaccttgattttgatttagcaagtggggagaggttgtgcttagatggaccaagtggcgtggggaagtctagtttgtttatgggattgttagggctttataggactaaagggaaaaaacaatttactcatagaaagcaaattcctataagctttttatttcaaaatcccttagaccaatttattttttcaacagtttatgacgaaatttttcaggtttgcaaggatagtaacaaagcgagggatattttggaaaccataaatctttgggataagaaacagttttcaccatttcaactaagtcaaggccaacagaggcgattagccattggcagtattttagctagtgatagtaaacttctattattagatgaaccaacttatggacaagatgcctatcacgctaatatgattacaactcttcttttgagttattgtcacaaaaatcattgtggggttatttttactagccatgatcctcacttaaaagagtgttttgcaacacgtttcttggaggtgtcatcttgttcaatttgaaaaactatcatccagctattaccttcctatgtttattaataccaaccttttcgtttagtttcacattgaggttaagaacgtctttgttatttctaattatagtagtaacactgcaatgcttcgtaaaggtttctttaaaaacttgggcgaaggtcaatctgatatcatttgtgatgggactctctttatttctagggacgtatttttggggaaaattaccccatcaattcgtcttagctagtctagtggcctgtcgtccgcttatttttatgaacgtgggtttgttatttcatgcatcacattctaattatgattttatagaatctctttatcaaactttcaaagtgcctagtcattttgcatatggtatttttgcggtctttaatcttctaccattaattaaattacaataccaacgtaatcgactcgcattccgactgaagaatcaggtaacttgggcattatcgcctagactaatattgtcagttttattaaagacgatatattgggtagaacagttagagttagcaatgctttctaaaggttttgaagtgggtaaagagcgaacacatgcttcaacttatcccgttcgttttcgagattatagtttacttggtatgagtattttattgtctataggaatgatttttaaataagtacaattagtttagtaatacaattgtgcatttatatagaatgagcgtgttctgctcatgagatcataacaaaggagattactatgttaaaagataagatgattgctaaaggagcaaaatatatccaatccatctatcaagatccatttattcaaggaattataaaagggcgtttagaccatgacgtaatctgccattatttacaggcagataatatctaccttgggaaatttgctgatatttatgccctgtgcttggcaaaatctgataatttacgagataaacaatttttccttgaacaaattgactttacattaaatcgggagttagcagatggtgaaggcccacatcaagccttggccgcttatactaatcgatcttatcaggatattatcgaaaagggtgtatggtacccgtcagcagatcattacattaaacatatgtattttcatttttacgaaaatggtattgctggtgctttagctgcaatgagcccatgtccatggatttaccatcaattggctaaaaaaataattgaggagaaccagtttttgaatggtaacccttttaataattggataactttttatgctaacgatacagttgaagagttaatggaaaactattttcgtatgatggattattatgcgcagaatttgtcaaaagagaagcaagctgatttggtagatgcttttgtgaaatcttgtcagcatgagagacgtttttttcaaatggcaataaatcaagaaaaatgggaggattaatatgacttatttagcaccagttttaactattgcaggaactgatcctagcggtggagcagggattatggcggatttaaagacatttcaagctcgtcggacttacgggatggctgttgtgactagtgttgttgctcagaacacttgtggggttagaggcgttcagcatatagaaacagctatcattgatcaacaactagcttgtgtctatgatgatattaagccaaaggcggttaaaacaggaatgttagcggagagggaaacaattagtttagtcgcttcatatttaaaaaaatatccgcaaccttatgtattagatcctgttatggtggcaactagcggacatcgtttaattgattcagatgccgtagaagcattaaaagaagacttattgccattagcaactattatcacaccaaatttaccagaagctgaggttttagtgggatatgacttatcagatgaagtaagtattattaaagcaggttacgatattcaaaaacaatattctgttagaaatgttcttataaagggaggacatctagatggcttggctaaagattatttatttttggaaaaagaagggttgataactcttagtaatcaacgtatcaatactattcatactcatgggactgggtgtacatttgcagcagtcgttgcagcggagttagctaaagggcaatcaattctaaacgcggtaagtaccgctaaatcatttattacttcagctatcgaaacagcgcctgagttgggccttggaaacggtcctgtcaatcatactagctatcaaggagactaaaatgtatttagaacaattaaaagaggtaaatcctttaaccatttgtatcactaataatgtggtcaaaaactttacagccaatggtttattagctttaggagcttctccggctatgagcgagtgcatagaggacttagaagacttgttaaaagttgcagatgcattattaattaatataggaacactaacaaaagaaagttggcaactttaccaagaagcaatcaaaatagcaaataaaaaccaagttccagttgtattagatcctgtagcggcaggagcaagtcgttttcgattagaagtgtcacttgatttattgaagaattattctattagtttacttacaggaaatggtagtgaaatcgctgctttgattggtgaaaaacaagcgtctaaaggggcagatggcggaaaagtggctgatttagaatcaattgctgtaaaagccaatcaagtttttgatgtgccagtggttgtcacaggagaaactgatgctatcgctgttagaggagaagttcgcttattacaaaatggtagtcctttaatgccacttgttacaggaactggatgtctattaggggcagtattggctgcttttattggtagttctgacagaagcgatgatcttgcttgtctgacagaggccatgactgtttataatgttgctggagaaattgcagagaaggtggcaaaaggtaagggggtgggaagtttccaagttgcatttttagatgccctttcccagatgaaatcagaaatgattatggacaaataggtggtgtcagtagatgaaagatacattgaaattatattttgtttgtggaactgtggattgctctaggaagaatatattgactgttgttgaagaagccttacaagcaggtataactctatttcaatttagagaaaaaggttttacagcattacaaggtaaggaaaaaattgctatggctaagcaactccaaatactttgtaagcaatatcaagttccttttattattgatgatgacattgacttagttgagttaattgatgctgatggtcttcatattggacaaaatgatttacctgttgatgaggcacggagacgtttaccagataaaatcatcggtttatctgtgagtacaatggatgaatatcagaaatcacaattatctgttgttgattacatcggaattggtccttttaatccgacacaatcaaaagcagatgctaagcctgctgttggcaataggacaacaaaggcagttagagaaattaatcaagatattccaatcgttgcaataggcggaatcactagtgattttgttcatgatattatagaatcaggtgcagatgggattgctgttatatcggctatttcaaaagcaaatcatattgtagatgcaaccagacaattgcgttatgaagttgaaaaagctctggttaataggcaaaaacacagtgatgtaatcaaataaggctacatcgttaattataagaatttttaagatattatatcatcacacaatactggtatttgaaaaagaatttaaactatgataatatagtagagttgaattctagttaaagaaagatttgaaagtatgcgtaaaattattattaacggtggcaagcaactgacgggagaagttgctgtatcgggtgccaaaaatagtgtagttgccttgattcctgccactattcttgctgatgatgttgtggtcttagatggagttccggctatttctgatgttgacagtttagttgacattatggaaactatgggagctaagattaagcgttatggtgagacgcttgaaattgatccatgtggcgttaaagatattccaatgccttatggcaaaatcaatagtcttcgtgcatcctattatttctatggaagcttattggggcgttatggtcaagcaacattaggtttacctggtggttgtgatttaggcccccgtccgattgatttacatttaaaagcttttgaagcgatgggagctagtgtttcttatgaaggtgattcaatgcgtctagcaacaaacggaaagcctttgcaaggagcaaatatttatatggatactgtcagtgttggtgcgacaattaacactataatcgcagcagctaaggcaaatggccgtacggttattgaaaatgctgcacgtgaaccagaaattattgacgtggctactcttttaaataatatgggagctcatattcgtggtgctgggactgatgttattacaattgaaggtgtgaaatcgctccatggcacgcgtcatcaagtaattccagatcgtattgaagcaggaacttatattgctatggcagcagctatcggacgaggaataaaagtgaccaatgtgttatatgaacaccttgagagtttcattgctaagttagatgagatgggagttcgaatgacagttgaagaggattcaatttttgtcgaagaacaagaaaggttaaaagctgtatccataaaaacctcaccttacccaggatttgctacagatttacaacaacctctaactcctttattactaacagcagaaggaaacgggagtttattagatactatctatgagaaacgtgttaatcatgttcccgaattagcacgtatgggagctaatatttctaccctagggggcaaaatagtttatagtggtcctaatcaattatctggtgcacctgtaaaagcgacagatttgcgtgcaggcgctgctttagttatcgctggcttaatggcagagggacgaactgaaattacgaatatcgagtttattttacgtggatattctaatatcatcgagaaactaacatcattgggtgcggatatccaattggttgaggaatagtatatataacaaagagttgagaatatttcttagctcttttcttcttgttttagattaagtcacttataggtatttgaaatctcttgtggtataatattatcatggatatatggacaaatttaggacggtttgcattcattgaaacagaacatgttaacctacgtcctgttgcctacactgatagggaagctttttggcgaatagcttcaaaaaggacaaatttacaatttatttttcctgttcaaaccagtaagaaggaaagtgattttcttttagttcattcttttatgaaagagccattgggagtttgggcgattgaagataaagttagtcataaaatgtttggagttatccgttttgaaaacattgatttatctaaaaagacagctgaaattggctattttttgaaagaaagttcttggggtcaaggcattatgactgaatgtctaaagacactttctttttttgcttttcgagagtttgggatggacaaattgatcatagtaacacataaagagaatattgctagtcagaaggttgctttgaaggcgcatttcaaacaatctaggagttttaaaggaagcgaccgttacacacgccgtataagagactatattgagtttcaattaactaggggtgattatcgttatgagtaaacatcaagaaattttggagtacctagaaaatttagctgttggtaagagggttagtgtacgcagtatttcaaatcatttaaaggtgagtgatggcactgcataccgcgctataaaagaggcagaaaataggggtattgttgagactagaccgcgtagtgggacagtacgtgttgctcaaaaagcaaaggttaatattgaaaaactgacttatgctgaaattgcaaggattagtgactcacaagttgttgcaggaatagagggactcagcaaggagtttagtaaattttctataggtgcaatgactcacagaaatattgaaaaatatttggtgcaaggagggttattgattgttggcgaccgtgatgagatacaacatttagccttacaacatcaaaacgctatcttagttacaggtggctttaatgtttccccatctgtttgtcgtttagcagataaacttcaaattcccgtaatggtaacacactatgatacattcacagtatcaacgatgattaatcacactttgtcaaatgccaaaattcgtactgatttaaagaccgttgaacaagtctatcagtcgcaaatggattacggtttcttagcgcaggatgataccgtaaaagaatttaatcttcttgttaaacaaactaaaaatgttcgttttccaatagtcaaccaagctaatgttgtcgttggtgttgttagtgttcaagatattcttggaaaagataaagaagtaaaattggcaacagtcatgtcaaaaaatatcattgttgctaaacctcgaatgagtctagctaatatcagtcaaaaaatgatttttgaagatttgaatatgatgccagtagtatcggatgactttgaattattaggcgttattacaagacgacaagctgtagaaaatttatcgatgtcgcaagggacggatttatacacctatagtgatcaaatcttgtctaatttacaaattgaagatggtcacttttcgtttttagtagaacccgctatgattgaccatacaggtagcttaacacaaggagttttgacggagttcttaaaagaaatttgtattcgtgtcttaactcgtaagcatcaacgcagtattgttgttaaacaaatgacactttatttcttgcaacctgttcaaattgatgaaataataatggtaacgccaacaattatttcagaaaaacggcgcgaagctacactcgatttagaattaaaattagaaaataaaattattgctaaagctatgatagcggtaaaaattaattagatataaggagaataaatagaaaatgattacattaaagtcagcacgcgaaattgaagcaatggatagagcaggtgattttttagccagcatccacattggacttcgtgatattatcaaaccaggagttgatatgtgggaagttgaagaatacgttcgtagacgttgtaaagaagaaaacgtattgccattgcaaatcggggttgatggtgcagttatggattacccatatgctacttgttgtgggcttaatgatgaagtggctcatgcctttcctcgtcattataccctaaaacaaggtgaccttttaaaagtagatatggttttaagcgaacctttagataaatcaattgttgacgtttcatcgttaaactttgacaacgtggctcaaatgaaaaagtacacggaaacatatagtggtggtttggcagactcgtgttgggcttatgctgtaggtgaagtttcacaagaggtgaaagacttaatgtctgtgacaagagaagcaatgtatattgggattgaaaaagcagttatcggaaaccgcattggtgatattggagctgctattcaggattatgcagagagtcgtggttatggagttgttcgtgatttggttggtcacggtgttggtccaacaatgcatgaagagcctatggtgcctaactatggtacagcaggtcgaggtctccgtcttcgtgaggggatggttttaaccatcgaaccaatgattaatactggtacttgggaaattgatacagacatgaaaactggttgggcacataaaaccttagatggtggtctttcttgtcaatatgaacatcaatttgttatcactaaagatggtcctgttattttaacgagtcaaggagaagaaagaacttactaaaatgaaattaaaaaaattctttgaggatttgctggctaaactagaatatagacccattcaagtttttatgcgtcattttcaaagtgcagagatggacttatcagccatagcagttgcttattatctattagtgacagcttttccattactagttattgctgctaatatttttccttattttcatattaatgtgtcggatttattgtcacttatgcaaaaaaatcttccgaaaaatatttatgaacctgcctcacgcttagcagtagatgctttttcgaaaccgtctaccggcattttgggattcgcgtcattaacagctttttggacaatgtctaaaagtttgacctctcttcaaaaagccattaataaagcatacggtgttgaccaacacagagactttgtgattagtcgtttagtgggtgtggggactgggctgatcatcctatttttactgacttttgttttaattttttcaaccttttcaaaaccagttttacagataattgtaaacatgtatgatttgggagatactctaacggcgtggcttttaaatcttgcacaaccagttacatttttgactatatttttaggtattggaattttatactttattttacctaacgcacgaattagaaaagtacgttatgtcattccagggacattattttcaacgtttgttattggtttttttagtaatttaattagccaatacgtcttaaatagggttgagaaaatggtagatattaaaacgtttggttcggtcgttatctttatcttaatgctatggtttattttcttagcccacattatgattttaggtgcaatactgaatgccagcgttcaagaaattgcgacaggaaaaattgaatcaaggcgtggagatattatgtctcttatccaaaaatccaaagaagaaaaataagaaaagacagctcttgttagagttgtctttttttgtctttaaaaataacaaatttgctcaagatgtagttgagtaaaataattaatatttgagatacaaggctttcaatggtgttgattttatttaaattgtgctgaacgaattgtccgataatagaaggaaattgatcaacaaaaataacagctaatatcaaatctaatcctaatgtgcctaatctagcgatgacaaatgtttgtaagcgttgaagctgttcaattttagtttgtttaaaaacaaatcgatcatttgtaaaaaaagcaaaaagtatagctattatgttagcaactattgcagagaatggagcgtcctgcgagaaattaaaaatcccttgtcgaataactaaataaagaagggatgttaatagtccgaacagtaaatataagctgacttcattttgaatactttttttcagtaacgattttaatttaaccatatttttattatatcacggatgcttcaaagtgatgaggaaatctcccataagcttggctttactttttgtttgtgatatacttagtaagttgttttacacaacccttgatgcttagttccctttcatcaagcatattacaaacgttagaagtgttaactatctaaacgttaaaggagaaattatgaacacatttacaactcgcgattacgctcacatggctattgtaacagctatctatatcgttttaaccataacgccaccttttaatgctattgcttatggtgcttatcaattccgtgtttcagaaatgctaaatttcttggccttttaccaccgaaaatacctttttgcggtaacgttaggatgtatgatttctaatctttatagttttggaatgattgatgtctttgtaggtggtggttcaaccttactttttgtttatcttggaaccattttattcaagcaatatcaaaaagattatctatttaatggccttattaacaaagcattctttttcttttctttcttctttgctgcttcaatgattacggtagcagttgaattgaaaattgtagcaggattacctttattattaacatggttaacgacagctgttggtgaattggcttcacttttggttggagcagtccttgtggataagttgagtagacacgtcgattttacaaaataaatatattataaagcgcgagacattgatctcggcttttttgtttgggtttatagttagcatagctagaaaatgctgcaacttttatgagaaatgctccaatttttactaatatccttagtctttgtgataaaatagaaatatggaaaatcgtatgaatgaattagtatctttgttgaatcagtacgcaaaagagtattatacacaagataatcccacagtttctgacagtcaatatgaccagttatatcgagagttagtagaattagaaaagcaacatccagaaaacattttgccaaatagtcccacacatcgagtgggtggtttagttttagaaggctttgaaaaataccaacatgaatatcctttgtattcattgcaggatgctttctcaaaagaagaattgatagcctttgataaacgtgttaaagcagagtttccaactgctgcttatatggcagagctgaaaattgatggtctatctgtctcgttgacttatgtaaatggtgttttacaggttggggcaacacgtggtgatggcaatattggagaaaatattactgaaaatttaaagcgtgttcatgatattcctctacatttagaccaaagtttagatattactgttcgcggagagtgctaccttcccaaagaatcttttgaagctattaacatagaaaaacgagcaaatggtgagcaggaatttgctaatcctaggaatgcagcagcaggaaccttgcgccaattaaacacaggaattgttgcgaaacgtaaattagcaacttttctttatcaagaagctagccctacgcaaaaagaaacacaagatgatgttttaaaagagctagaaagctatggcttttcagtcaatcatcatcgtttaattagctcgtctatggagaaaatttgggattttatccaaactatagaaaaagatagagtttccctcccttatgatatcgatggtattgttattaaggttaatagcatagcaatgcaagaagagctgggcttcactgtaaaggcacctcgttgggcgattgcatataaatttcctgctgaagaaaaggaagcagaaatattatctgttgattggacagttgggcgaacaggagtcgtaacaccaacagctaacctaactccagttcaactagcagggacaaccgttagtagggccactctgcataatgtagattatattgccgaaaaagatatccgtattggagatactgttgttgtatacaaagcaggggatatcatccctgcagtcttaaatgtcgttatgagtaagcgaaaccagcaagaagtcatgcttattcctaaactatgtccttcttgtggtagtgaattagttcattttgaaggtgaggtggctttacgttgtattaatccgctgtgccccaaccaaatcaaagaacgtttagctcattttgctagccgagatgctatgaatattacaggttttggtccatccttagtcgaaaaattatttgatgctcatttaatagcagatgttgcagatatttatcgtttaagtatagagaatttattaactttagatggtattaaagagaaatctgcaactaagatttatcatgcaatccaatcttcaaaagaaaattctgctgaaaaacttctttttggcctaggtattcgtcatgtgggaagcaaggcgagccgccttttattggaggaatttggtaatttgaggcaactaagtcaagcaagtcaagaaagtattgcctcaattgatggactaggaggggttattgccaaatcacttcataccttctttgaaaaagaagaggtagataaactactagaggaattaacttcctataacgttaattttaattatctaggaaaacgagttagtacagatgcacaactttcaggtttaacagtcgttttaaccggtaagcttgaaaaaatgactcgtaatgaagcaaaagagaaattacaaaaccttggtgctaaggtgacaggtagcgtttctaaaaagactgatttaattgttgcaggaagcgatgcaggaagtaaactaaccaaggctcaagatttagggattacaatacaagatgaagactggttactcaacctttaagtgaggaagaaatgaagaaacaaaaaaaagcgcgtttaatttataacccaacttctggtcaagaaattatgaaaaaaaatgtagcggaagttcttgatatacttgaaggatttgggtatgaaacatcagcctttcaaacaacaccaactaaaaattctgccagagatgaagctactagagctgctcaagctggttttgatttgattgttgcagcaggtggagatggtactattaatgaagttgttaatggtattgcacctttgaaacgtcgtcctaagatggcaattattccaactggaacaactaatgattttgctcgtgccttaaaaataccgcgaggtaatcctattgaagcaactaaattaattggtaaaaatcaaatcgttaagatggacattggtcaagctcaagaggacaattattttattaatattgcagctgcaggtagtttgacagagttaacttatagtgtaccaagtcaattgaaaacaacgtttggctatcttgcttatctagcaaagggtgttgaattattacctcgagttcgaaaagtaccagtcaaaattactcacgataagggtgaatttatcggtgatgcttcaatgatttttgttgccatcacaaattctgtaggagggtttgaacaaattgcacctgatgccaaattggatgatgggaaatttacccttattttagtaaaaactgcaaatcttattgagattatgcatctcattcgtttggtgctagcaggtggaaaacatattaatgataaacgagtagagtatattaaaacgtcttatctaactatcgaacccctatcagacgagcgtatgatgattaacttagatggagaatatggaggagatgctcccattactctagcaaaccttaaaaatcatattaggttctttgctaatactgatgaaatttcagatgatgctttagttttagataaagatgaactagcgatagaagctattgcacagaagtttgctaatgaggtagatgatttagaaggattaggagattgatgaatggataatactgtcattgtacattaccatagccgaaagaaaaattactttaatttaagtttatggcagtggcgcgatggctcagagggtcaagatgctcatttttcacggtttgacagtttcggtgctgttgcgatactaaaatatcccttgccatattttttaagccattattatgtgattgttaaggataaaaattggcatcataaaacaatagattatcgcattgattgtactcaaggtggtgcacgtaaagaagtttggattgtagatggggatgacaatctgtattattctcgtcaagcagcagttagtagccatcattatagtagacgccaacctcatgcctacgacatggcaatcaatagtagagcgtttgacaaaaaatggggatttgatggttggttaggttttgaatattcagaaactaaaacggcttttagattatgggcccctactgcggaacgtgtagaactgattttatatcattcgacagatgaaacagcaagtgtatcaaaagttctttctatgaaaagagggacagccgtcaattataaaaatcataaagaaaatacccatggagtctggtttactgaacttgaaggaaactataattaccaagcatatacttatcgagtctactatagacgacgtacctttaaaattacgagagacccttattccattgcaacgactgcaaatggtaaaaggtctattgttattgctccagaagcattaactccggaagggtttaaaataagtcatggaaaagaagctaagtggcggctcgaaaaccccaatcaagcagtcatttacgaaatgcatgtgcgtgatttttcgatatctgagacttcaggagttaagacagattatcacggaaaatttaagggattgcatcaaaaaggtacggttaatcagcatggtgataaaacgacctttgattatgtacaagacctaggagttaactatatccaacttcaaccaattttcgatcatcatcagacatttgatgatgatggtcactatgcttataattggggatatgatcctgaaaactacaatgttccagaagcaagcttctctagtaatccacatgaacctgcaacgcgtattttagaattaaaatctgctatccaagcgtaccatgatgcaggcattggtgttattatggatgttgtctataatcatactttttcatcaactgattctgcatttcaactaacggttccagattattattatcgaatgaatcacaatggaacatttcaaaatgggtcaggctgtggtaatgaaacagctagtgaaaaagaaatgtgtcgtaagtatattcttgattcagttttgtattgggtgaaagaatataatattgatggttttcgatttgatttgatgggactacatgatgtagaaacgatgaacattataagaaatgagctaaataaaatcgaccctcgtattttggtttatggagaaggatgggacatgggagctggtctcacgcctcaaaataaagctaaaaaagataatgcttatcagatgcctggaattggctttttcaatgatgatgtaagagacgctgtcaaaggtgcggaaatttacggagaatttaaaaaaggcttagtttctggaaacagtacagaagatattgttgcaaaaggcattttaggaagtgatgagttagtatcatacattgatcctagtcaagttttaaattatgttgaagcacatgacaactacaacttaaatgatttgctatgggaattacatcctaatgacaacgagaaacaacatatttaccgagttgaagtagctagtgctatgaatctattgatgcaagggatggctttcatgcaattaggtcaggagtttcttcgaacaaagtgttatcctacaggtgataaaggtcaacttactcaagcagataaagaaagggctatgaattcttacaatgccccagaccaagttaatcaggtcaactgggataatgttacctttcataagagtactattaattttattaggaaaataattactttgaagacaaactctccttacttttcttattctagctttgaagagattcgcaaacatgtttttgtagagtctgctcaataccattcaggtttcataagttttacagtcgaagaacataagaaaataaaaataattttcaatattaaaggaaaacgcttgcagaattctttcataggtgatataataatatcaaatcatgaagaaggaaaagcgatagattcattagatgatgagctttctgtaatgatccttgatatcacaaaataacctgaaaacattcaggttatttttgtgtatattaaggaatttgatttgaatttgagtttcttatattttagttaatttttcggaaatatagagggtgaaatattttcagatgcgtctgtatgaggaaaatgtattcctctttttttgtaccattgaggaaatatttttgtcttatattgactagtaggacctgtgaggtgagtagatgtccaataaagatgagttatatacttttggaataggtgaaaattttcatctccagaattatttaggcgtacatagcgaaaatggaagcttttgtttcagagtttgggctcctaatgctgaaaatgttcaagttattggagattttacagattggcgaaatcgacctctccaaatgaacaaaaatcaagcaggagtttgggaagctaacagtttggatgcgcgcgaaggtgatttatataaatatttggttactcgtaaaggtggtcaagtagttgagaaaatcgatcctatggcagtttatatggaaagacgtcctggaactgcaagtgttattaaagttcttagaaataaaaagtgggaagatggtctttggatgggaaggcgcaaacgtctgggttttcagaagcgtccaattaatatttacgaagttcatgctggttcatggaaaaaagatgattttggacatcctatgactttttctcagttaaaagattacttaatcccctaccttgttgagatgaattatactcatgttgaatttatgcccttaatggcacatccgcttgatatgagttggggatatcaattaatggggtattttgcttttgaacatacctatggtactccagaagaatttcaagactttgtagaagcatgtcataaaaataatataggagttcttgtagattgggttccaggacactttattcagaatgacgatgctttagcctatttcgatggaactgctacttatgagtatcaaaatcatgatcgtgcgcataactatcgatggggagctctgaactttgatttaggaaaaaatcaagtacaatcctttttgatttcgagtgccttgttctggattgaacattatcatattgatggtattcgtgttgatgcggttagtaatatgttatatctcgattatgatgaaggaccatgggaagctaaccaatttggggataatcgtaatttggaaggatatcactttttaaggaaacttaacaaagtaattaaagagcgtcatcctaatgttatgatgattgctgaagagtcaacagcttctaccccaataactaaagacttagagtctggaggattgggttttgactttaaatggaatatgggctggatgaatgatatcctgcgtttttatgaagaagatcctctctataggcaatatgattttaatttagtgacttttagttttatgtatatattcaatgagaactttgtactagctttttcacatgatgaagtagtacatggtaaaaagagtatgatgcataaaatgtggggtgaccgttataatcaatttgctggtttacgtaatttatatgcatatcaaatgtgtcatcctgggaaaaaacttctctttatgggaagtgagtttggtcaatttttagaatggaaatataatgatcaactagaatgggaaaacttaaatgatgatatgaaccaaaagatgcaacgctatactaaacaattgaatcaattttataaagatcataagtgcctatggcgtattgatgattcctttgacgggctagaaattattgatgcggataataaatctgaaactgttttatcttttatacgaaaagatgataaaggcgatttgttactttgtgtctttaatatgactcctgtagaacgccctaactttactattggtgttccgcaagcgggtatttatgaagaagttttaaatactgaaatggaagagtttggaggtgtttggaaaaaccacaatcctgtaacgaaaacacaagtggctacatggaaagattatgatcatactttaagttttacattaccagcccttggggcaagtgtttggagaataaaacgtcggcttcgtaaataagtctgcaatttagtaacctcattttgaaaggaaagaataatatgaaaaatgaaatgttagcactcattctcgccggaggacaaggcactcgactcggaaaattgactcagagcattgcgaaacctgctgttcaatttggaggtcgttaccgtattattgactttgcgctttcaaattgtgcgaattcaggtattaataatgttggagttattactcagtatcaaccgctggaactcaatactcatattggaaacggatctagctggggactagatggtatcgattcgggagtaactgtattacagccatattctgcaacagaaggtaatcgctggtttcaaggtaccagccacgctatctatcaaaatattgactacattgatcgtattaatccagaatatgtactcattctctctggggaccacatctataaaatgaactatgatgacatgctacagacgcataaagataatttagcaagcctaacagtcgctgttttagatgttcctttaaaagaagcaagccgttttggaattatgaatactgattcaaacgaccgtattgtcgaatttgaagaaaaacctgaacatcctaagtcaacaaaggcttcaatgggaatatacatttttgactggaagagattacggacagttttaattgatggtgaaaagaacggcatagacatgtcagactttggtaaaaatgttataccagcataccttgaatcgggtgaacgtgtttatacctataattttgatgggtattggaaagatgttggtactattgaatccctttgggaagctaatatggaatatattggagaagataacaaattacatagtcgtgatcgttcatggaaaatctattctaaaaatttgattgcaccacctaatttcatgacagaagatgcaaatgttaaagattctttagttgtagatggatgctttgttgcaggaaatgttgagcactccattttatcaactaatgtccaggtaaaaccaaatgctattattaaagactcctttgttatgagtggcgcgactatcggtgaaggtgcaaagataaatcgagctattatcggtgaggatgctgttattggtgatggtgttgtgattgatggaagtaaagaagtagaagttattggttataaagaagtagcgggggttccaaatgaagattgataaatatactgcgattttaggaaatactgttagttacccagatatgcacagtttgacggataatcgtccgcttgcttctctaccttttgatggtaagtatcgtttaattgattttcaattatcctctttagctaatgcaggcgttagaagtatttatggtatttttcgtgggaataatgttcgctctgtttttgaccatattagaagtggtcgtgagtggggcttaggtacactgttgagtcactattctttaggattctatgatacagacgatgatactcgtacagtcaatggggattattacgatcaaattttaacttacttgaggcgttcgggtagcgaccagacgatatatatgagttgtgatatgctttgtaatattgacttaagtcaagtaatccacttgcataatgcaaatggtgcgcaagccaccgtggtttaaaaaaaatgccgagatcagctattgcagaggctaatcaagtcttgaccattgatgaatctgatcatgtagtgagtctaggtaaagctgtagataatgacgataaccaaaaaatgtctgctgagatttatgttatcgatacaccttggttaatcgaaaaaatggaagaggaagctcaaaataatgaaccacgtaaactccgcttcttacttcgtgatttaattgttgaaagtaatgctttggcttttgaatacactggttatttgtcaaacatttcttctattaaatcctattatgatgctaacatggacatgttaacaccaaataaattttattcgctcttcttttcaaaccaaaaagtttatactaaggtgaaaaatgaggaagctacttattttgataaacaatcaaatgtctctaattcgcaactagcctctggaagtattattaaaggttatttagaccattctatcgtttctagaaattgtctccttgaaaaagggactcgagtagtcaatagtattatctttccaaaagtaaaaatcggagaaggggcaaccattgaaaatactattattgacaaatgcgttaaggttgcatccggagttacattgaaaggtagtttagataaaccgttagtgattcctaaattttcagagattaatgaggatattatacaatgaaaataatgtttgttgcggcagagggtgctccctttgctaaaacaggtggtttgggagatgtgattggcgcactcccaaaatcacttagtaaaaaaggtcatgatgtcgctgttgtcatgccatattatgatatggtagaccaaaaatttggagaccaaatagaaaacctcatgtatttctatacagatgttggctggcgtcatcaatatgtaggagttaagagactttctcaagataatgttacgttctactttattgataatcaatattatttttatagaggtcatgtctatggtgattgggatgatggggagcgttttgcttatttccaattagctgctttagagttgatggagaaaatcgattttattcccgatgtcttacacgtccatgattatcatacagcaatgattcctttcttattgaaagagaagtaccactggattcaggcctataataatataagagcagtttttactattcacaatattgaatttcaagggcagtttggtccagaaatgttaggagatttatttggagttggcgctgagagatatgaagatggaactcttagatggaataattgtcttaattggatgaaagcagcaattctttactcagatagagtgacaacggtatcaccaagctacgcaaatgaaataaaaactccagaatttggtaaaggtttagatcaaattatgcgtatggaagcaggcaaattatctggaattgtaaatggtattgatagcgatttgttaaatccagaaacagatgcttttttgccatatcatttttcaaaaagcaacttagagggcaaaattaaaaataagttggctttacaggaaaatttgggcttacctcaagataaaaatgtaccattaattggtattgtttcacgacttaccgatcaaaaaggatttgatattattgcttctgaattggacaatatgcttcaacaagatattcaaatggttattttaggaacaggctatcaccattttgaagaaacgttctcttattttgctagtcgttaccctgaaaaactatctgctaatattacttttgacttaagattagcgcaacagatttatgcggcttcagatatcttcatgatgccaagtgcttttgaaccttgtggtctctcgcagatgatggctatgagatatggtagcttgcccttggtacatgaagttggaggattaaaagatactgtggtagccttcaatcaatttgatggtagtggtacaggtttttcatttaatcatttttcaggctattggttaatgcaaactctaaaactagcattagaagtttataatgattatcctgaagcgtggaaaaagttacaatggcaagctatgtcaaaagatttttcatgggatacagcatgtgttgcttacgaacaactgtatcagcaactacaataatcaccctattttagtgattagttgataagcttatcgaatctctatgctaaacgtttcttatgtaaaaccactttagtatagagattttattatcctataaggtaaaatattattaatgtaaagagacactatatcaaaaataaagtgttgtcatatcttaataagggattaaattaaagctaaaaaaactaaaaattgttatttgaaaaggattgtgtaaaccatctcaaactatttcatgaaaacgtaatcaaatgaggaaattcattgacatgcacaagaaataggaataaaataacggagtaaatattttttaaaggagaattctattatgaatttagctattttagcacttggtttcgccgtgatgggtgtttcaatcggtgaaggaattttggttgcaaatattgccaaatcagcggctcgtcagcctgaaatgtttagcaaactgcaaacattgatgtttacaggtgtggccttcattgaaggtaccttcttcgttctatttgcgtttacattcttagtaagatagacgacaatttagaaaaaaaggagggatgaggattggaatctacaagtaatccaaccgtatcttttttaggcattgattttgatttaaccatcctagctatgtctctcttgacaattactattatctttatcttagtcttctgggctagtcgtaagatgacaataaaaccaaaaggtaagcagaatgtcttagaatatgtctatgagcttgttaataatacaatctcacaaaatttaggacactatactaaaaattatagtttattgatgtttattttattcagttttgtcttcattgctaacaacttaggattgatgacatcattgaaaacacatgagcataatttttggacatctccgaccgctaattttggtgtagatattacattatcattattagtagcatttatttgtcatattgaaggtattcgcaaaaaaggaattggtggttatctcaaaggtttcttatcaccaacaccagcaatgcttccgatgaatttattggaagaagttactaatgttgcttcattagcattgcgtctttttggtaatatcttttctggtgaagttgtcactggattacttttacaacttgcagttttatcaccatttacaggtccactagcttttgcattgaatatcgtttggacagcattctcaatgtttattggtttcatccaagcgtatgtgttcattatcttgagctcaagttatattggacacaaagttcatggtgacgaagaagaataagaaaagagaggagaaatatgtcaatacttattaatagtacaacgattggtgatatcattatcgtatctggctctgtgcttctcttatttatcttaattaagacttttgcatggaaacaaatcacaggtatttttgaagcccgtgaacaaaagatagctaatgatattgatactgctgaacaggcacgtcaacaagctgaagcttttgcaactaagcgcgaggaagaactatctaacgctaaaactgaagctaatcaaatcattgataacgctaaagagacaggtcttgcaaaaggtgatcaaattatttcagaagcaaaaactgaagctgatcgattaaaagaaaaagcacatcaagatattgcccaaaataaggcagaagcactagcagatgttaagggtgaagtagcagatttaacagttttattagctgaaaaaattatggtatcaaatcttgataaagaagctcagagtaatctcattgatagctatattaaaaagctaggagatgcctaatgaataaaaagacgcaggctctaattgagcaatattcaaaaagccttgttgaagttgccattgaacataaaattgttgaaaaaatccaacaagaagtagcagctttaattgatatttttgaaacaagcgagcttgagggtgtcctgtcaagtcttgccgtttcacatgatgaaaaacaacattttgtgaagacattgcaaacatcatgttcaacttatcttgttaatttccttgaggttattgtacaaaatgaacgtgaagcacttctatatcctattttgaaatcagttgatcaggaacttatcaaagtgaatggtcaatatccaattcaaattacaactgcagttgctttgtctccagaacaaaaagaacgtctttttgatattgctaaaactaaattagctttaccaaatggacagttagttgagcacattgacccatctattgttggtggatttgttgtcaatgcaaacaataaagtaattgatgcaagtgttcgtaatcaattacatcaatttaaaatgaaattaaaatagaaagtggtgtgacttttggcaattaatgcacaagaaattagcgctttaattaaaaagcaaattgaagacttccagccaaattttgacgtcacagaaactggtattgttacatatatcggtgatggtattgctcgtgctcgtgggctagataatgctatgagtggagaacttcttgaattttcaaatggtgcgtacggtatggctcaaaaccttgagtctaatgacgtgggtatcattattttgggtgatttctcagaaattcgtgaaggtgatgtggtaaaacgtactggtaaaattatggaagtaccagtaggggaagctatgattggacgtgtcgtcaatccgcttggtcaaccagttgatggactaggtgaaattgagacgacagcaacacgcccagttgaaacaccagcacctggtgttatgcaacgtaaatcagtttttgagcctcttcaaacaggtctcaaagcgattgatgctttggttcctatcggacgtggtcaacgcgaattgattatcggtgaccgccaaactggtaagacgtctgtagcgattgatgcaatcttgaatcaaaaaggtcaagatatgatctgtatctatgtggctatcggtcaaaaagagtctacagtacgtacacaagttgaaactttgcgtaaatacggtgcccttgattatacaatcgttgtgacagcttcagcatcacaaccatctccattacttttcattgctccatatgcaggagtagcaatggctgaggaattcatgtataacgggaaacacgttttgattgtttatgatgatttatcaaaacaagccgtagcttatcgtgaactttcgcttcttcttcgccgtcctccaggtcgcgaagcttacccaggggatgttttctaccttcatagtcgtcttttggaacgttcagctaaagtatcagatgctttaggtggaggttcgattacagcgcttccgttcattgaaacacaagcaggtgatatctcagcatatattgctacaaacgttatttcaattactgacggccaaattttcttgcaagaaaatctctttaactcaggtattcgtccagcgattgatgcaggttcatcagtatctcgtgttggtggtgcagcgcaaattaaagcgatgaagagagttgcaggtacgcttcgtctagatcttgcttcttatcgcgaacttgaggcattcactcaatttggttcagaccttgatgcagcaacacaagcaaaactaaatcgtggtcgtcgcacagtggaagtgttaaaacaaccattacacaaaccattaccagttgagaaacaagttgtgattttatatgctctaacacatggattccttgatgatgtacctgtaaatgatattttagcttttgaagaagctttgtatgattactttgatgctcattatgataatctcttcgaaacaatccgcacaacaaaagatttaccagaagaagcagaattagatgctgctattcaagcatttaaagatcaatcacaatttaaataataggagggttctaatatggcaggctctcttagtgaaattaaagacaagattctctctacagaaaaaacaagtaagattactagtgcgatgcagatggtctcatctgctaagttggttaaatctgaacaagctgctagagattttcaagtgtatgcctctaaaattcgtcaaattactactaacctcttaaagtcagacttagtatctggatcagataaccctatgttatcttcacgtccggtgaagaaaacaggttatattgttattacttctgataagggtttagttggtggttacaattcaaaaatcttaaaagcgatgatggacactataactgactatcatactgagaatgatgattatgccatcatttcaattggtagtgttggttctgattttttcaaagcacgtggaatgaatgtttctttcgaattacgtggtttagaggaccaaccaagttttgatcaagttggtaaaattattgctcaagcagttgaaatgtacaaaaatgagttgttcgatgaattatatgtttgctacaatcaccatgttaacagtttaactagccaagtcagaatgcaacaaatgcttcctatcaaagaattggatgcagaagaggcttctgaggatagagtgattactggttttgaacttgagccaaaccgtgaagttatattggagcaattattgcctcaatatactgagagtttgatttatggagctattattgatgctaaaacagcagagcatgcggctggtatgacagctatgcagactgcaactgataatgctaaaaatgttatcaatgatttaactattcaatataaccgcgctcgtcaagcagctatcacacaggaaattacagaaattgttgcaggtgctaatgcacttgaataattaattagtctatagaaaaaatagtgaacaaaggtattttaaatcctttgtatcatatgataaggagaaatacatgagctcaggcaaaattgctcaggtagttggacctgtcgttgacgttgtatttgcaagtggcgacaaacttcctgagattaataatgcattgattgtctataaaaatggcgataagtcacaaaaagtagtacttgaagttgctcttgaacttggtgacggcctcgttcgtacaatcgctatggaatcaactgatgggcttacacgtggtttggaagtattagatactggtcgcgcaattagtgtgccggttggtaaggatactttgggtcgtgtcttcaacgttcttggagatgctattgaccttgaagagccttttgcagaagatgcagaacgtcaaccaatccataaaaaagcaccatcgtttgatgaattatcaacatcatcagaaatcttagaaactggtattaaagttattgacttattagcaccttacttaaaaggtggtaaagttggacttttcggtggtgcaggtgttggtaaaaccgttcttattcaagaattaatccacaacatcgcccaagaacatggtggtatttcagtatttactggtgtaggagaacgtactcgtgaagggaatgacctttattgggaaatgaaagaatctggcgttattgaaaaaacggctatggtctttggtcaaatgaatgaaccaccaggagcacgtatgcgtgtggcacttactggtcttacaatagctgagtacttccgtgatgtagaaggacaagatgtgcttctcttcattgataatatcttccgtttcacacaagctgggtcagaagtgtcagcgcttttaggtcgtatgccttcagccgttggttatcaaccaacacttgctacagaaatgggacaattacaagagcgtatcacttcaactaaaaaaggttctgttacatcaatccaagctatttatgtgccagcagatgactatactgaccctgcgccagctacagcctttgctcacttagattcaacaactaaccttgaacgtaaattgacacaaatggggatttatccagccgttgacccattagcttcaagttctcgtgcactcacaccagaaatcgttggagatgagcactatgaagttgcaacagaagtacagcgtgttcttcaacgttaccgtgagttacaagatatcattgcgattttaggtatggatgaattatcagatgaggaaaaaacgttagttggacgtgcacgtcgtatccaattcttcctttctcaaaacttcaatgttgcagaaacatttactggtcaaccaggttcatatgttccggttgaagaaactgttcgcggattcaaagaaatcctagatggtaaacatgatcaaattccagaagatgccttccgtatggttggtggtattgaggatgttatcgcaaaagcagaaaaaatgaactattaatgaggtgatgctatggcacaattgactgttcaagtagtaacaccagatggtattagatatgaccatcacgctagtctcattactgttagaacgccagatggtgaaatgggaattttaccaggtcacataaatttgattgctccccttaatgttcatcagatgaagattaatcgttctcatcaagaaggtgtagactgggtagctgttaatggtggtataattgaagttaatgaggatcaggtgacaattgttgcggattcagcagaacgagcacgtgatatagaccttaaccgtgcagaacgggctaaggaacgcgctgagcgtgcattagaaaaagctcaaacaactcagaatattgatgagatgcgtagagctgaggttgctcttcgtcgcgcaattaaccgtattagcgtcggtaaaaagtagaaaaatggtctaattagttttgtgactaattaggcttttttagtgtataatagaaggcatgaatatgatattaaatatagtaactatagttagtaattttatttttattgcccttttttatcaactttttgtagatttatttgactggtctaaaatgattaaaatgtcccctcaaaacatctcaaaattaaaagtttttattttgttgataagtatagttggtggctatgtggttagtcattttttattggaagtgattcagttgtgtcaatcaatcttttgggctctccaataaaggaaatattagctgaactatgatataatcaacttactattgttataagaatggagattcaaatggataaaattattgtggaaggtgggcaaacgcagcttcaaggtcaagttgttattgaaggagctaaaaatgcagttttacctcttttagcagccacaattttaccaagccaagggaaaacattgttgaccaatgttcctatcttgtctgatgtatttacaatgaacaatgttgttcgtggtttagatattcaagttgactttaattgcgataaaaaagaaatcttagtggatgcctcaggtgatattttagatgttgcaccttatgaatttgttagtcaaatgagagcttctattgttgttttgggacctattttagctagaaatggccatgctaaggtttcaatgccaggcggttgtacaattggtagccgaccaattgaccttcatcttaaaggtttagaagctatgggagctacgattacacaaaatggtggtgatattactgcccaagctgaaaagcttaagggagctaatatatacatggattttccctcagtcggtgccactcaaaacttaatgatggctgctacacttgcttcaggcacaacaacgatagagaatgctgcacgtgaaccagaaattgtagaccttgcgcagttactaaataaaatgggagctaaagtaaagggtgctggtacggaaacattaacgatcattggtgttgatgctttacatggtacagaacatgatgttgtccaagatcgtattgaagctggaacctttatggtggcagctgctatgacttctggaaatgttctagtaaaggatgctatttgggaacataaccgtcctttaatctctaaattgatggagatgggtgttgaagtgtcagaggaagaagatggtattcgtgtaaaagctgatactaaaaaattgaagccagtgactgtgaaaacactccctcatccaggatttcctactgatatgcaagctcaatttacagctctaatggcagtagttaatggcgaatcaactatgattgagacagtttttgaaaatcgttttcaacatttggaagaaatgcgtcgcatgggattacaaacggaaattttacgagatactgcaatgattcatggtgggagagctttacaaggtgcaccggtcatgtctactgacttacgagctagtgcagctttaatcttggcaggaatggttgcgcaagggcaaacagtagttggccaattaacccatttagaccgtggttattatcaattccatgaaaaattagcggctcttggtgctaatattaaacgtgtaagtgaggcgtaatatggcatctagtggttggaaatatgtattaaaacaaatcggtctaatagtattagtcatactattagccttgctgtttttagcggttggattgatgttgggttatagtgtttttggtgacggagagcatgcttactctattttatcgctggataaatggcaaaatattattggaaaatttttaggaaaatagaaagagccactataagttatttgatgcttatagtggtttcctttgagagttaattttagcagtagaataatacaatgacaaaaaaacaaaaacaaataacagcttcgattgtaactttgcttttttcattactggcaatagggttaggtgaaagcaaatctttgcctaatgatcacattttaaaacaggtgacagatttaattattagtaatgaatctggcaaaaatacttcccttaaaaatgtatcaggaactcctagtagagagttatctgaatctgttttgactagcaatgttaaaaaacaattgggaacaaatatagcttggaaccagtcaggtgcttttatcattaatcaaaataaaacagatttgaatgctaaagtgtcaagtgcaccatatgctattaatgaaataaagaaggttaataaccaaattgttccgactaaagcaaatgccttattaacaaaagcaactcgtcaatatcgaaatcgagaagaaacagggaatggtagaacttattggaaaccagctggatggcatcagataaatggattaaaagggagctataaccacgctgtggacagaggccatttaattggttatgctttagtagggagtttaagaggatttgatgcctccacaagtaatcctaaaaatattgccacacaagcagcttgggcaaaccaagctaatagcaaccaatcaacagggcaaaattattatgaaactttagttcgtaaagcattggatcgtcataaaactgttaggtatcgtgtgactttaatttatgacagagataatcttttatcttcgggatcacatattgaggctaaatcttcagatggaagtttagaatttaacgtttttattcctaatgtacaatcgggattattatttgattatgcaacaggaaaagtgaagcagacaaagtaatctttatctaatagtgcttgttaaagactgaaaaatttgataaaatagtctttaattgaatagaggtctgtgagactagtaaaccaagggaagctgcttagggagttcagccgtgactgcaagctgaatcagtgaaagagggtggaattcactcacaaataggactataattaaggtctgattggtcgatcagatagaaaacggatggtaccgcgtgtcaacgctccgattaaggggtagtggcacgcttttttttgttttcaaagctacttattttgacttggaggaaagatggatttacaaaaacaattagaagagttgaaaatatcaactcaagaaaagcttaaagaaatgactgggaaccacactaaagaattacaagacttacgtgtacaagttttaggaaaaaaaggttctctaacagaattactaaaaggtctgaaagatttatctaatgatttacgaccagttgttggaaaacaagtcaatgaagtacgtgatattttaacaaaagcgtttgaggaacaagctaaagtagtggaagctgcgaagattcaagcacagttagagtctgagagtgtcgacgttaccttgcctggtcgtcaaatgacattaggtcaccgtcatgtcttaacacaaactagcgaagagattgaagatatctttttaggtatgggattccaagtggttgatggttttgaagttgagaaagactactataattttgaacgaatgaatttaccaaaagatcatccagcccgtgatatgcaagatactttttatattacagaagaaatcttgctacgtactcatacttcgcctgttcaagcacgaacaatggaccaacatgatttttctaaagggcctttaaaaatgatttctcctggacgtgttttccgtcgtgatactgatgatgctactcatagccatcaattccatcaaattgaaggcttagttgttggagaaaatatttcaatgggcgatctcaaaggaacacttcaactgatttctcaaaaaatgtttggagcagagcgtaaaatccgacttcgtccttcatatttcccattcacagaaccttcagttgaagttgatgtctcttgcttcaagtgcggaggtaagggatgtaatgtctgcaaacagacaggttggattgagatattgggtgctggtatggttcacccaagtgttttggaaatgtctggtattgattctgagaaatactccggttttgcctttggtttaggtcaagaacgtattgcaatgttacgctacggtatcaatgacattcgtggcttctatcaaggtgatgttcgcttcacagatcaattttaagattttagatagcaagtagcatcattggtgtgatgataaatttatgttaacgctattaccttactcaataggaggttttctaatgtctcaaattacttttaaaaaggttggccttgataatgtgaatattttacagaatattgctatagaaacctttcggcagacgttttctcatgataatagtgaggaacaacttcaagcatttttcaatgagtcttacactttaccagtattaaaatcggaaattacccatgctgaatctgatacttattttgtttatcttgatacagatttagtgggttatttaaaagtaaactggggaagtcagcaaactgaaaaagatcttgataaagcatttgaaattcaaaggatttatcttctagatgcctaccaagggcaaggtataggtaaggctactttcgaatttgctttggatttagcttataaatcaggcttagattgggcttggttaggtgtttgggagtttaatcataaagctcaggcattttacgctaaatacggatttgaaaaattttctgagcaccaattttcagtaggtgataaagtggatacggattggttattaagaaaaagtttacactaaaaactacaaagcacttgtataaaaataaaagaaaataaatagagagaaattacatgttagtatcgtataaatggttaaaagagttagtggatgttgatgttacaacagcagaactagctgagaaaatgtcaaccactggtattgaggttgaaggtgtggagacaccagcggaaggtttatcaaaattagttgtaggtcatattgtttcgtgtgaagatgttccagatacccacttacatttgtgtcaagttgatacaggggatgatgaacttcgtcaagttgtctgtggtgctccaaatgtcaagactggtattaatgttatcgtagcggttcctggtgctcgtattgcagataactataagattaaaaaaggtaaaatccgtggtatggagtcacttggaatgatttgttcacttcaagagttgggcttatcggaaagtatcattccaaaagagttttctgatggtatccaaattttacctgagggagctatacctggtgatagtattttctcttatcttgacttagatgatgaaattattgaattatcaattacaccaaaccgtgcagatgctctttcaatgcgtggtgttgcccatgaggtagcagcaatttatgggaaaaaagttcattttgaagaaaaaaatctcattgaagaagcagaaagagcagctgataagatttctgttgtcattgaatcagataaagttttatcttactcggctcgtattgttaagaatgtaacagttgcaccaagtccacaatggcttcaaaataaactgatgaatgctggtatacgtccaattaataatgttgttgatgtgacaaactatgttcttttgacttatggtcaaccaatgcatgcttttgattttgataaatttgatgggacaactatagtagcacgtaatgctgagaatggggaaaagttaattactcttgatggtgaagagcgtgacttaatagctgatgacttggtcattgcggtaaatgatcaaccagttgctttggcaggcgttatgggaggacaatcaactgaaattggtagttcttctaagacagtggtccttgaagcggcagtatttaatggaacaagtatccgcaaaacaagtggaagactcaaccttcgttcagaatcatcttctcgctttgaaaaaggtatcaattatgatacagtttcagaggctatggattttgcggctgcaatgttacaagaattggcaggtggtcaagttctttctggtcaagttacagaaggagttcttccaactgagccggtagaggtatcaacgactcttggttacgttaatactcgtttgggaacagaacttacctatactgatattgaagaagtatttgaaaaactcggctttgctatttctggttcagaagtgaaatttactgtgttggtaccgcgtcgtagatgggatattgccattcaagctgacttagttgaagagattgcccgtatttatggttacgaaaaattaccaacaacattgccagaagccggagcgactgcaggagaattaacgagtatgcaacgcttacgtcgtagagtccgtacggttgctgaaggagcaggattatctgaaattatcacctatgctttaacaactccagaaaaagcagtgcagttctcaactcaagcaactaatataactgaacttatgtggccgatgactgttgatcgctcagcacttcgccaaaatgttgtttcaggaatgcttgatacaattgcttataacgttgctcgcaaaaacagtaaccttgcagtttatgagataggaaaagtttttgaacaaactggtaatccaaaagaagatttaccaactgaagtagagacgtttacttttgccttaacaggtctagtagaggaaaaagatttccaaacaaaatccaagccagttgatttcttctacgccaaaggtattgtagaggcgctctttattaaattaaaattagatgttacttttgtagcacaaaaaggtttagcaagtatgcacccaggtcgtacagcaactatcttattagatgggaaagagattggttttgttggtcaagtacacccacaaactgcaaaacaatatgatattcctgaaacttatgttgctgaaatcaatctatcaactattgaaagtcaaatgaaccaagcgttgatttttgaagatattacgaagtatccgtctgtatctcgcgatattgcattattacttgcagaatctgttagtcatcatgatattgtgtcagcaattgagacatcaggggtaaaacgtctaacagcgattaaactgtttgatgtctacgctggaaataatattgcagaagggtataaatcaatggcttatagcttaactttccaaaaccctaatgacaatctaacggacgaagaagtggctaaatatatggaaaaaatcactaaatcactcgttgagaaagttaatgcagaaataagataatttatattttacgttgaaaaataaataaaaaacagcatcaattaagatgctgtttttttatttaaaatttatagatgttctacggagaaagtatcaccgtgttggatgtcaccatattgaaagcctttgttaaaccaacgttggcgttgttcagctgttccatgggtaaagctatcaggcactaattttccgtaggtttctttctgaagggtatcgtctccgacggcgtgggcagcattcatggcctcttcaaagtctccttgttctaagagattttttcccctgatgtagtgagcccatacccctgcataataatctgcttgaagttctagccgaacatttaaagcatttgcttctttcttagtaagtccgtgtcgcattctattatacttatccataatgcctaactctgtttgaatgtggtgaccaacttcgtgggcgatgacgtaggccatagcaaaatcaccagtagcaccatatttatgtgataattcattgtaaaaagaaatatcaagatagatttttttatctgctgaacaataaaatggtcctgaagcagattcacctataccacaacctgtttgaattgaattggtgtaaagaacaagttttggttccttataatttccaaaaccttgggtttggaattcttgtgaccagaaatcctcagttgagccaaggactttattaacgaaatcgatttgttctctcgttgcgctattatcaacagaacgtgagacattctgagattggtaactagaaggtgaggatgagtcattaaaaatgctggttagtccccctccgccaagtagcagtaagatgattaaaaccacaagcttggttttccaactccctcgcagcaataaaagttgaagaatcggtaatccacttcctccgctagagaatgaacctccgctactggagcgacgatcttcaacattgtcgctttttcttaggtcatctattttcataagtatctccaaagtgttttataggctcattataaactattttaataagaaatgcttgaatttttaactaaatatcttcccctagatttgaagctatttttggtataatattaataaactgtaaaggataagttgaagaaggtttacttctcagttgacttataagataggagattcatgaaattactttatactgatattaatcatgatatgacagaaatcttagtcaatcaggccgcgcatgctgctgaagctggatggcgtattttttatattgctccaaactctttatcttttgaaaaagagcgtgcagtattagagaaccttcctcaagaagcctcttttgctattacaattactcgctttgctcaattggcacgttattttactttaaaccagcctaatcaaaaagaaagtttaaacgatattggattagcaatgatcttttatcgtgctttagcaagttttgaagatggacaattaaaagtttttggacgattgaagcaagatgcttcctttatcagtcaattggtagacctatacaaagaattgcagacagcaaatctgagtattttagagttaaaatatttacattctcctgaaaaatttgaagatttattagctatttttctagtggtttcagatcttttaagagaaggagaatacgacaatcaatctaaaattgccttttttacagaacaagtaaggtcaggccagctagatgtggatttaaagaacactatccttatagtcgatggttttacccgtttctcagctgaagaagaagctttaattaaaagtctgagttcacgttgtcaagagattatcatcggagcttatgctagccaaaaagcgtataaggctaactttactaatggaaatatttattctgcaggggttgattttttaagatatctagcaacgacatttcaaacaaaaccagaatttatcttgtccaagtgggaaagtaaatctggttttgaaatgatttcgaaaaatatcgaaggtaaacatgattttacaaatagtagtcacattttagacgacactgctaaagattgtataacaatttgggagtgcattaatcaaaaagatgaagtggaacatgtggctagagctatacgtcagaaactttatcaaggatatcgctacaaagatattttagttttactaggagatgtagatagttataaactacaattaagtaagatttttgagcagtatgatattccttattatttcggtaaagctgaaacaatggctgcgcaccctttagttcattttatggattccttgtctcgaataaaacgttatcgatttagagctgaagatgttttaaatctttttaagacaggtatttatggagagattagccaagatgatttagattattttgaggcttatatctcatatgcagacattaaaggtcctaagaagttctttacagattttgttgtgggggctaaaaaatttgatttagggcgtcttaacactattcgtcagtccctccttactccactggaaagttttgtgaaaacgaaaaaacaagacggtataaaaacactcaaccaattcatgtttttccttactcaggtaggtttgagtgacaatttatcgcgattagttggtcaaatgtctgaaaatgaacaagaaaaacatcaagaagtttggaaaacatttacagatattttagagcagtttcaaacaatatttggtcaagaaaaattaaatttagacgaatttttatcgttattaaattcaggtatgatgcaagccgagtatcgtatggtccctgctactgttgatgtggttactgttaagtcttacgatttggtagaaccacatagtaatcaatttgtctatgccctaggcatgacacaatcacattttccaaagattgctcaaaacaaatctttaatatctgatattgaacgtcagcttataaatgatgccaatgacactgatggtcattttgacattatgacgcaagaaaatttgaagaaaaaccattttgctgccctctctctttttaatgctgctaaacaagaattagtgttgactataccacaattattgaatgagtctgaagatcagatgtcaccatatcttgtcgaactaagagatataggtgttccttttaatcataaaggacgccaatcgttaaaagaagaagctgataatattgggaattacaaagctttattatcgcgtgttgttgacttgtatcgctctgctattgacaaagagatgactaaagaagaacaaactttttggtcagttgctgttcgttatttgcgtcgtcaattaacttctaaagggattgagataccaataattacagatagtcttgatactgtgacagtttcatcagatgtgatgaccagacgcttcccagaagatgacccacttaaattatcctcatctgctttgacaactttttataataatcaatataagtattttttacaatatgtgttaggtttggaagaacaagactcaattcatccagatatgcggcaccatggaacgtaccttcatcgtgtttttgaaattctgatgaaaaaccaagggatagaatcttttgaagagaaactcaactctgcaattaataaaaccaatcaagaagatgttttcaaatccttgtattcagaagatgcagaaagtcgttattctttagaaattttagaagatatcgcgcgtgcaactgcaaccatattacgacaagatagtcagatgactgttgaaagtgaagaagaacgatttgaactaatgattgataatactataaaaattaacggtattattgaccgtatcgatcgtttatctgatggttctttgggtgtcgtggactataaatcaagcgctcaaaaattcgatatccaaaaattttataacggtctaagtccacaattagtcacctacattgatgctatcagtcgtgacaaggaagttgaacaaaaaccaccgatttttggagctatgtacttacatatgcaggaacctagacaagacttgtctaaaattaaaaatttagatgatttagtaacaaaaaatcatcaagctttaacttataaaggattattttcagaagccgaaaaagaattcttagcaaatgggaaataccatctcaaagattccctttattcagagactgaaattgctattttacaagcacataaccaatcgctttacaaaaaagcatctgagactattaagtcaggtaagtttttgatcaatccatatacagaagatgctaaaacagttgacggagatcagtttaagagtattacgggattcgaggcggataggcatatggcacgtgccagagcgctttataaattacctgctaaggaaaaacgtcaaggtttcttaacattaatgcagcaagaggaggaaaatgatgacctttaagcctttcttaaatccagaagatattgctgttattcagacagaagaaaaaaattctgataaaaaacaaaagcgaacgcctgaacaaattgaagccatttatacttttggtaacaatgtcctggtatcagcttcggctggttctggaaagacttttgtaatggttgagcggattttagataaacttttaagaggggttccgattgactctttgtttatctcaacatttacagtaaaagcggcaggtgagctcaaagaacgtttagaaaagaaaataaacgagtctttgaaatccgcagaatcagatgatttaaaacagtttctcacccagcaacttgtcggcattcaaacagctgatattggtactatggatgcttttacgcaaaaaatagttaaccaatatggttatactttgggcatatcacctatatttaggattttacaagataaaaatgagcaagacgtcataaagaatgaggtctatgctgatttattttctgactacatgactgggaagaatgcagcttcattcataaaattagtcaaaaatttctcaggtaatcgtaaagatagcaaagcttttcgagaaatggtttataaagtttatgcttttagccagtccaccgataaccccaagcgctggatgcaaacagtttttctaaaaggtgcacaaacttacactgattttgaagctattccagatcaagaagtttcaagccttttaaatgtaatgcaaacaactgctaatcaattacgtgatttaacggatcaagaagattataagcaattaactgctaaaggggttccgacagcaaattacaaaaaacaccttaaaataattgaaaatttagtccattggtctcaagactttaatttgctgtatggaaaaaaaggattgactaatttggcacgtgatatcactaatgtgattccttcaggcaatgatgttacagttgctggcgttaaatatcctatctttaaacaattgcataatcgtatcgttggacttaagcacttagaagttatttttaagtatcaaggagaatctcttttcttgttagaattattgcaatcctttgttttagatttctcagaacaatatttacaggagaagattcaagaaaatgcttttgaattttctgatattgcccattttgcaattcaaatattggaagaaaatcatgatattaggcaactttatcaagataagtatcatgaagtaatggttgatgagtatcaggacaataaccatacccaagagagaatgttagaattattgtctaatggacataatcgtttcatggttggagacataaaacaatcaatttaccgttttcgtcaggctgatccacaaatttttaatgataaatacaaagcttaccaagacaatccaagtcaagggaaattaattattctgaaagagaattttcggagtcaatcagaggttttagacagtacaaatagtgtgtttacacatcttatggatgaagaagtaggagacattctttatgatgaaagtcaccaattaaaagctggtagtccaagacagcaagaaagacatccgaataataaaacacaagttttactattagatactgatgaagatgatatagatgacagtgatagtcaacaatatgatattagcccagctgaagcaaagttagtcgcaaaagaaattattcgattgcataaagaagagaatgttccctttcaagatatcaccctcttagtttcttcaaggacaaggaatgatggtatcttacaaacttttgaccgttatggtattcctttggtaactgacggtggggagcaaaattacttaaaatcagtcgaagtgatggtaatgcttgatactttgcggtcaattgataatcccttaaatgattatgctctagttgctcttttgagatctcccatgtttggctttaatgaagatgatttaacaagaattgctattcaggatgtcaaaatggctttttatcataaagtgaaattgtcttatcataaagaaggtcatcatagtgatttaattactccagaattatcttctaaaatagatcactttatgaaaacattccagacttggcgtgattttgctaaatggcattcgctttatgatttaatatggaaaatatataatgaccgtttttattatgattatgtaggagctctgcctaaagctgagcaacgtcaagccaatctatatgccttggcacttcgagcaaatcagtttgaaaaaacaggtttcaagggtttatcacgctttattcgaatgattgataaagttttagaaaatgaaaatgatttggcagatgttgaggtggcattaccgcaaaatgctgttaacctaatgactatacacaaatcaaaggggcttgagtttaagtatgtatttattttaaatattgataagaaattttcaatggtagacataacttcccctcttattttaagccgaaatcaaggaattggtattaaatatgttgctgatatgcgacatgaactcgaagaagagatactgcctgcagtaaaggttagcatggaaacacttccttaccaacttaataaaagagagttacgcttagctactttatcagagcaaatgcgtttactttacgtagctatgacacgtgcagagaaaaaattatatctggttggtaaggctagtcaaaccaaatgggctgatcattatgacttagtatctgaaaataatcatctcccattagctagtcgtgagacttttgtgacctttcaagattggttactggctgttcatgaaacctataagaaacaagagttgttttatgacatcaacttcgtatcattagaggaattaacagatcaccacatagggatggttaaccctagtctacctttcaatcccgataataaggtagagaatcgtcagtctgaagatatcgtgcgtgcgattagcgtgttagaatctgttgagcagattaatcaaacttataaagcggctattgagttaccgacagtgagaacaccaagtcaagtcaaaaaaatctatgagcctattctagatatagaaggtgttgatgtgatggaaactattactaaaacatcagtagattttaagttacctgatttttctacaagtaaaaagcaagacccagcagctttaggatctgctgtacatgaattaatgcaacgcatagagatgtcatctcatgtcaaaatggaagatattcaaaaagctttgacagaagtgaatgctgaaacaagtgtcaaagcggctattcagattgaaaaaatcaactattttttccaagaaacctcactcggtaagtatatacaagaagaagtagaacatctgcatcgagaggcaccttttgccatgttaaaagaagatccggagagtggtgagaaattcgttgtacgtggtattattgatgggtatctactattagaaaatcggataattctatttgattataagactgataaatttgtcaatcctctagaattaaaagaacgctatcagggacaaatggctttatatgcagaagctttaaaaaaatcttacgagatagaaaagatagacaaatacttaattcttttaggtggtaaacagctagaagtggtaaaaatggattaaagaaaggaaaaaatgatagtcgaacaaaaatttggaaatggttttacttggattaacattgaagcagagcaattgcgaacagaaacatcggaaattcaagcaaaatatttggatagtgagattattacatatgctctggatgattatgaacgagcctttatggaatgttctcatattaaaggaaaagaagtcttgacgattatttttaatactattgatctaaagcagaaagaaagttattatgagaccgttccgatgaccttttgcttatcacacgaccgtttgataacggtgacacggtctcgaaatagttatatgctagaactattgcaaaaatatctagaccgtaatccagatgtctctcctaaaaaatttttatttgcagctttaactttgattacaaaacaatattttaatgttgtatcgaaaattgatagagaaaaggatattctcaaccgtcaattgagagaacaaacaaccaataagcgcttattagccatgagtgacctagagacaggatccgtttatcttttgacagctgccaatcaaaatgcattggtattagagcaattagatgttcatcctagtcagcgatttaattctgaagtggaaaaagaacagttatcagatgctctcattgaagcgcatcagttagtcagtatgacacaattaaacagtcaggtactttcacaattatcatctacttttaataatgtcttaaataataacttgaacgaaaacttaacaggtttgaatatcatttcgattaatttagcgattattgcagcaattactggcttttttgggatgaatattccattacctcttacagaatcacggagttcatggttaattgttattgctacttcggtcttactttgggttattattgctcaaattttaaaacgagtttttaacttaagaaaataaaaatattcggtgcttacgcaccgaatatttttttatttacctaagcagaattggctgaagagctgagttattagttcatctggagctgcatccccagtgatttctccaagtatttcccaagttctagtcatatcgacttgtaagagatcaacaggcattcctaattccaagccctcattgacagcttttaaactatcaacggctttttcaattagtgagatatggcgagcatttgatagataagtagcgtcatgttctaccataccagcgttgtcaaagaaaatatcgttaatacgttcttcgattttatcgatgttttcattttctaaaaccgaaattggaataacatttttaggtaattcgttaacttctattttttgaggaagatccgttttattgagtaatacgatacgattactttctttacttagttctagaagggagcggtcttgtaatgttagtggttcggaactattgagaaccaacaacacaaggtcggcttcttctaaagccttctttgaacgttcaacaccaattttttcaacgatatcatctgtatcacggataccagcagtgtcaactagttttaaaggaactcctttaatattgacgtattcttcaataacatcacgagttgttccttcaatatctgtcacaatcgccttttcttcacgtaagaggttatttagtaagctggatttaccgacatttggacgaccaatgattgctgttgaaagtccttctcgaagaatttttccacgtctggcagttcgaagtaaattttccataagtgcttgaaactcttgtgttttttcacgcatcagtgttgtagtcatctcttcaacgtcatcatattcagggtaatcgatattaacttcaacttgggctagagtatttaaaatttcttgtcgagtgttattgattagtgtctttaaagaaccatctaattgcttaacggcaatatccattgctttatctgttttagctctaataagatccataacagcttcagcctgagtcaagtcaactcgaccatttaaaaaagcacgtttagtaaattctcctggttcagccattcgtgctccatgtcgtaaaattaactgaagaatttcgttagtaactgcaattcctccatgcgtattaatttcaataacatcttctcttgtgaatgtttttggagcaagcataacgcctaacataacttcatccaagatttcatttttatctgggtccacaatatgaccatagtttaaggtatgggattggatcgcggatagatcttttccacgataaatttttgatgctatctttaaggcatctgtaccagatatacggacaataccaatagctccctcaccgagaggagttgaaatagctgcgatggtatcaaattcttttgtaatagacataaagtctctctctttcttggaaattactaacattcattgtaacctaaagccctaaaaggtgcaatcatttgattaaaagagaagatttccataatggttttatttgaaggtatgctataataaaactatgattatactacaaggaaacaaaattgagcgctcattttcaggtgatgtgctttttgataatattaatattcaagttgatcaacgtgatcgtattgctcttgttggacgtaatggtgctggcaaatcaacgcttcttaaaattttagttggtgaagaggctccgacaaaaggagaaataaataaaaagcgtgatttgagtttgtcctacttggcacaagatagtcgttttcaatctgaaaatacaattttccaagaaatgttacaagtttttgactcattaagagaagtagagaagcgcttacgtgaattggaattacaaatggggcaagtttcaggaagtgacctggaacaattgatgaaaacatacgatattttgtcagaagagtttcgtgaaaaaggtggctttacctatgaatcagatataaaggctattttaaatggttttaagtttaacagtgatatgtgggaaatgcctattagtgaattgtctggcgggcaaaatacacgattagcgcttgcaaaaatgctacttgaaaagccagaattacttgttttagatgaaccaacgaaccatttagacattgatacgattgcttggttagaaaattatcttgtaaattatcaaggagcccttattattgtcagccatgaccgctattttttagacaaggtagctacagtaacttatgatttaacgacacattctctagaccgctatgtaggcaattattcgaaatttatggatcttaaggcagagaaaatagcgactgaagaaaagaattttgaaaaacaacaaaaagaaattgctaagttagaagattttgtacaacgtaacattgttagggcttcaaccactaaacgagcacaagctcgtcgtaaacaattagaaaagatggaacgactcgacaaaccgaatgtagagcaaaaatcagctaatatgacttttcatgctgggaaagtctcagggaatgttgttttaacacttgagaatgcagctattggttatgaaggtgtttctttatcggagccaatcgatttggacgtgaagaaatttgatgctattgcaattgtaggtccaaatggtatcgggaaatcaactttaatcaaatcgcttgttgggcaaattccttttatcaaaggagaagcaaaattaggagcaaatgtcgaaactgggtattacgatcaaagtcaaagtaatttaacaaaaacgaatactgttttagatgagttatgggatgctttttcaacaacgccagaagttgaaattagaaaccgtttaggagcttttcttttttcaggtgatgatgttaaaaaatcagtttcaatgctatcaggtggtgaacgagcgcgtttgctattggcaaaattatctatggaaaataataattttctcatattagatgagccaacaaaccacttggatattgatagtaaagaagtcttagaaaatgcactcatcgaatttgatggcacattactttttgttagtcatgatcgctattttattaatcgtgtggcaactaaggttctcgaaatttctgataagggaagtactctctatctaggagattatgattattacctcactaagaaagccgaactagaggaattagcacgtttaaatgaagaagaagtgagtgcttcaaaaacagaaatcgacgttacatcagattatgagacacaaaaagcaaatcaaaaggaatttaggaaaattacccgtcgcgttgtagaaattgaggcgcgtttggaagttcttgaaaatgatgaaaacaatatcaatggtttaatgttagaaaccaatgacatcggaaaactctctgatttgcaaaaagagctggaatcaatccaagaagaacaattgctattaatggaagagtgggaaaatctaaatatgagactagatttgtgagaaaatttcaaaaacaatagtttgtgaaaaaaagtacattttaaattgagatgccttttacgaaaacaaagaaagcggttcaaattcttgcatcttgtgaaaaaaacttatacaataattaagtaataaagatttttttggaggttagaatggtaactctatctaaagaacaacacttggatatgtttctaaaaatgcaacgtattcgtgatgttgatatgaaatttaacaaattggttcgtcgtggtttcgtccaagggatgactcacttctctgttggtgaagaagctgcttcagtaggtgctatccaagatttaacagattcagatatcattttctcaaaccaccgtggacacggacaaactattgcaaaaggtattgatattggtggaatgtttgctgaacttgctggtaaagcaacaggaacatcaaaaggtcgtggaggctcaatgcacttagcaaaccttgaaaaaggtaactatggaacaaacggtatcgtcggtggaggatatgcgcttgcagtaggtgctgcccttacacagcaatatgaaggaactgataacattgttatcgccttttcgggtgactcagcgactaacgagggctcattccatgagtcagttaacttagctgctgtttggaacttaccagttatcttctttatcatcaacaaccgttatggtatctcaacagacatcacatactcaactaaaattcctcacctttacatgcgtgctgatgcgtacggtattccagggcattatgttgaagatggtaatgaccttatggctgtttacgagaaaatgcatgaagttatcaattacgtgcgttcaggaaatggaccagctattgtagaggttgaatcataccgttggtttggtcattcaactgctgatgctggggtataccgtactaaagaagaagttgattcatggaaagctaaagatccagtaaaacgctaccgtgcatacttaattgaaaatgaaatcgctactgaagaagagcttgcagctattgaagcacaagtgattaaagaagttgaagaaggggttaaattcgctgaagaaagtccattccctgatatgtctgttgcatttgaagacgtttttgtggactaaaataacctaaagtagatgagatttatctcgttctattattcaattgattaaaaaacggatattcggaggaaataatgagcgaaactaaagttatggctttgcgcgaagcgattaatgtcgctatgagcgaagaaatgcgcaaagatgaaaaagtatttttaatgggtgaagatgtaggtgtatatggaggagacttcggtacatctgttggtatgttagaagagtttggtgctaagcgcgttcgcgacacaccaatctcagaggctgcgattgcaggttcagctatcggtgctgcacaaacaggtttgcgtcctatcgttgatttgacattcatggattttgtaacaatcgcaatggatgctatcgttaaccaaggtgctaaaacgaattatatgtttggtggaggtctatcaactccagttactttccgtgtggcatcagggtcaggtattggttcggctgcacaacactcacaatcattagaagcttggttaacacacattccaggtctaaaagttgttgcacctggtactgttaatgagtcaaaagcacttttgaaatcttctattcttgacaataacccagttatcttcttagagccaaaagctctctatggtaagaaagaagaagttaatatggaccctgatttctatattccacttggtaaaggggatattaagcgtgaggggactgacttaacaattgtttcttatggccgtatgcttgagcgtgttatgcaagctgctgaagaagttgctgaggaaggtattaacgttgaggttgttgatccacgtacacttattccgcttgataaagaattaattatcgattctgttaagaaaactggtaaattgatcttggttaacgatgcttataaaactggtggtttcactggtgaaattgcaactatggttgctgaaagtgaagcatttgattaccttgatcatcctatcgtgcgtcttgcaagtgaagatgttccagtaccgtattcacgtgtacttgaacaaggaatcttacctgatgtagcaaaaattaaagatgctatctataaagtagttaacaaaggtaaataattcataaaacaaagagggactgaggaatgagtgaaaacttagcctctttccttgtttataggttttaatttatatcgttagatgaaacatatatttgacgatatagtttagtgtgaaaggaaaactatggctgtcgaaattattatgcctaaactcggggttgatatgcaagaaggcgaaatccttgagtggaaaaaacaggtaggtgatgttgttaatgaaggtgacgtcctacttgaaattatgtcagataaaacaaatatggagattgaagcagaagactcaggtgttttactaaaaatcacacatgggaatggagatgttgttcctgtaactgagacaattggttatattggtgctgaaggtgaagaagtaacagaagcatcttcttctgaaaatacatcagttgaagaaaacgcgacacaagtaacttcagaaccagaaaaagttgaagaaacatcagaaccaagtgtgccagcagctacaagtggtgaaaaagtacgtgccactcctgcagctcgtaaattagcaagagagatgtctattgaccttgcactagtatctggaacaggggcaaatggtcgcgttcacagagaagatgttgaaaacttcaagggtgctcaaccacgtattacaccattggcacgtcgaattgctgaagatcaaggagttgatatagcagaaatcactggcagtggtattcgtggtaaaattgttaaaaatgatgttttggctgctatgtcaccgcaagcagcagaggctcctgtagaaactaaagctacaccaacaacagaagaaaaacaattaccagaaggtgttgaagtcattaagatgtctgcaatgcgtaaggctatttctaaaggtatgactaactcttacctcactgctccaagctttacacttaactatgacattgatatgactgaaatgatggctcttcgcaagaaattaattgatccaatcatggctaaaacaggcttgaaagtcagctttactgatttgattggaatggccgttgttaagacattgatgaaaccagagcatcgatacctaaatgcttcattaattaacgatgcacaagaaattgagcttcataattttgttaatattggaatcgcagttggtcttgatgatggtttgattgttcctgttgttcacaatgctgatcaaatgtcactttctgactttgttatagcatctaaagatgttattaagaaaactcaagaaggtaaattaaaatcagctgaaatgtcaggttcaacattctcaattactaacttaggtatgtttggtactaagacgtttaacccaattatcaatcaaccgaactcagcaatccttggagtaggagctactattccgactccaacagtggttgatggtgaaattgtagctcgaccaattatggcaatgtgtttaacaattgaccaccgtattgttgatggaatgaatggtgctaagtttatggttgatcttaagaacttaatggaaaacccatttggtttacttatttgattccgtaggtcttaatttgatataataagttattcgaaaaacgaaagaggaaataaaaaatggcttttgatgtaattatgccaaaacttggggttgacatgcaagaaggcgaaatccttgagtggaaaaaaaatgaaggtgacaccgttaatgaaggtgatgtccttcttgaaatcatgtctgataaaaccaatatggaaatcgaagcagaagacactggtgtacttttaaaaattgtacatcaggcaggagatgttgttcccgtcactgaagtgattgcctatatcggagaagaaggtgaagaagtaggtacgtcatcaccttcagctgatgcaactatcacagctgaagatggtcaatcagtttctggacctgctgctccttcacaagagacagttgcagcagcaactcctaaagaagaacttgcagctgatgagtacgatatcgtagtcgtaggtggtgggcctgcaggttattacgcagcaatccgcggtgctcaacttggaggaaaaattgccattgttgagaaaactgaatttggcggtacgtgtttgaatgttggttgtatccctacaaaaacatatcttaaaaatgctgaaatcctagatggtttgaaagtagcagctggacgtggtatcaaccttgcttcaactaactatgcaattgatatggataagactgttgcctttaaaaattctgtagttaagacactgactggtggtgtacgtggtctcttgaaagcgaacaaagttgaaattttcaatggacttggacaagtaaaccctgataagtctgttgttattggcgataaagttatcaaaggtcgtaacgtcgtccttgcgactggttctaaggtatctcgtattaatattccaggtattgaatcaccattagtattaacatcagatgatattcttgatttacgtgaaattcctaagtcacttgctgttatgggtggtggtgtcgtaggtattgagcttggtcttgtatgggcttcatatggtgttgacgtaactgttattgaaatggctgatcgcatcattccagcaatggataaagaagtatcgctagaacttcaaaaaatccttgctaagaagggaatgaagattaaaacatcagttggtgtttctgaaattgttgaagccaataatcaattaacgcttaaattaaacaacggtgaagaagttgttgctgataaagctcttctttcaattggacgtgttccacaaatgaatggtcttgaaaatcttgagcctgaacttgagatggaacgtggacgtattaaagttaatgcttatcaagaaacttcaattccaggtatctatgcaccaggtgatgttaatggaactcgtatgttagctcatgctgcataccgtatgggtgaagtagctgctgaaaacgcactcggcggtaataagcgtaaagcacatctagatttcactccagcagctgtttatactcatcctgaagtagcaatggtggggatgacagaagagcaagcacgtgaacaatatggtgacatattagttggtaaaaatagctttacaggcaatggtcgtgctatcgcttcaaacgaagcacatggttttgtaaaagtaattgctgaacctaagtataaagagattcttggtgttcacattattggtccagctgcagcggaattgattaatgaagcttctacgattatggaaaatgagttgactgtctacgatgtagcacaatctatccatggtcacccaacattctctgaagttatgtacgaagctttcttagatgttctcggtgaagctattcacaaccctccaaaacgcaaataattttgtttaatatatttgagattgagcttttatagcttcaatctcttttcacgtatatattgtctgaatattataaaatattagttaggaatttaaaatgaaatatatcgttaacacgtctaatgatccggcttacaatgttgctttagaagcttacgcctttcaaaagttgacagatatcgatgaaatctttattctttggattaatgaaccggctatcattattggacgccatcaaaatacaattcaagaaattaacaaagagttcattgataaaaatggcatccatgttgtccgtcgtttgtcaggaggcggagcagtttatcatgacttgaataatttaaactacactattatttctaataatacacaagaaggtgcctttgatttccaaactttttcaaaaccagttattgatactcttgctaaattaggtgttaaagcagaatttactggtcgtaatgatttagaaatcaatggacaaaaatttgcaggaaatgctcaagcttattacaaaggtcgtatgatgcatcatggttgtcttttatttgatgttgatatgtcagtcttagggcaagcactcaaagtatctaaagacaaaattgaatctaaagggataaaatctgtacgcgcacgtgttacaaatattgttgaccatctttcagataaaattacagtacaagaatttagcgatgccattttagctcaaatgaaggaagaatatccagagatggatgaatatgttttgagtgatgccgagttatcagaaatccaagctatgcgcgataatcaatttgctacatgggattggacgtatggtaaagcacctgaatacaccattgaacgtggtgtccgctatccagctggaaaaattacgacttatgctaatgttgaaaattcaacgataaaatctgtcaaaatctttggtgacttctttggagtgaaacctgtggatgatattgaaaaaatgttggagggtgtccgctacgattacaaagatgttttagcagcgcttaaaacagttgatacaagtcaatacttctcacgtatgacacccgaagagattacaaaagctattgtagactaaaatcaaaaaatctagtcaaagtcttcgcctttggctaggttttttgtatggttaagtgacgttatagtagtaaaaaaacaacgttattgataacgctggtttttatattattcaaaatctgcttttgatttaacgtctccgtattcttcaggaatctctaaagataaaatttcttcataactagggaggacaatctctttaccgtatttgttacggagggcagttgccacaagacggtaagctagattagcattacgagaaaggattggaccgtgaaagtatgacccaaaaacattcttataatgaaccccttcagtaccatcttctttgttattcccatttccataaatgacggttcctaaaggtttttcgtcttctgataaaaaggtacgtccttgatgattctcaaagccataatatgtttcattgaattcatcgttgtgaatcttgatatcaccaatatagcgattattattttggtttagcgtatagtgtcccataacgccaatgccctctattcgttctccattagcttgaatatagtattgtcctaaaagttggaaacctccacaaatagcaagtactacaccattattttgaatgaatttgttaatgtcttctttcttactgggaagatcgcgtgcaacaatggcttgttcgtagtcttgtccaccaccaaaaaatgccatctgataatagttgggatcaaatctatcttctaatgaaacgatatcaaatgtcatttgacatcctagtttttctcccacatatttcatcattaagatatttccgttatcgccataagtatttaataggttaccataaagatgagctacattaagagtgtatttataatctttggtagtaggagattttagtgaggtataagtcattaattcatctcctttctgatagcgttgtggttagcaagaatttcacgaaactccagcatagctgtatatgttgctaaaatataagcatgctcagtctcttgctgctcaatcattgtcataatatcttgcagtttatcagcttgttttatgcgtttctcatcataaccagttacacgtaagcgacgagcaatttcagagtggcgaacaccaccagcaaatatttctgggatattcatcgtgagaatagtttcaaaattagcgtcccaaatccaagaagtatcaataccgtcagcataattggcattcagtagtactgagagagagaacgggtatggagcaagtttaatcatatcaagagcttgactagctcctaccggatttttaatcagaactaaagtacattttttatttccaattgtaaaggtttcttgacgaccaaaaacggcacggcttttatcaaatccatccttaatttgacttggttctacaccaaaatattcagcaacagatactgccgccaaagcattgtaaatattataaaggccacccacgttgatattatattgttggccatcaataacgaaacctgatgaagtatttgtcagatgtgttagccttgttaaggcataatcaaggtttggacgttcaaaatcacaattaggacaagtgtagtcaccaaggttggcatatgtgttcaatcgataagttaaaattgcttgacactttggacagagaataccctcagtattatagtgtgctaatcgtggctcatgtttgtcggtattaaatccatagaattgcacagggttagtcacgcttttagaattaaaaagtggactgtcaccgttagctaagatagtagcttgcggagcgttagcagctccatctaaaatcatttgataagttgtgtagatttcgccataacggtccatttgatcacggaaaatattggtaaagacgaacaaactaggctttatatactgtgtaatacggggtaaactcgcttcgtctatttcaaggacagctatttttttaccagatttacttttcttagctgttaggaaggtcgaaacaatacctgtaatcatatttgctccacttgggttggttaccacctgaccgaaggcttcctttaaaataccaactgttaaagctgttgttaaggttttaccgttagtaccagtcacaactacaatttcataatctttggcaattgtatctagtatatctttatcgaatttgagtgctaaactacccggataagtagagccacgtcccattttacttaaaaggtaatgagcagacttaccggcagccactcctagtgctgtatttattttcataaagatattttatcataaaaagatgctttcttgctaaagaaaatattatgaaaacatggtataatgtagacgatggaaaataagaaatcaaggagttaagcaagaaactcttcgacaggctaccagtagagaggaagatatggatattttttcagctattgattcaaagttttgggcgagcattatggaaaatccatggatgatccttattcatctcatggatattatcatagtagctgttctgatttataaatttatcaaagcgctagcaggcacaaaaattatgtccttaattcagggcgttattttgtttatcatcattagatttgtgtcagaatggatagggctaacaacgattacatttttgatgaatcagattgttacttatggtgtaattgcaggtgttgtcatctttgctccagagattagaacaggtctcgaaaaatttgggcgaacaccacaactatttacgcaacgttctcaattaagcagtgatgaaaagctagtagatgcccttgttaaggcagttgcttatatgagtccgcgtaaaataggagccttgatttcaattgaacgtacccaaactttgcaagagtatatagctacaggtatcccattagatgcagatatttccagtgaattgttaattaatattttcattcctaatacaccactgcatgatggtgctgttattgtaaaagataaaaaaattgctacagcatgctcgtacttacctctatcagaatcatcttcgatttcaaaagaatttggaacacgccacagagcagcgattggtctatcagagaattcagatgcactaacagttattgtttctgaagagactggtggtatttctgttgctttgaaaggtgaatttttacatgatctttctaaagatagctttgaagcaattctgagaactcagttgattcaaaatcaagaggaaaactcaaaattagcttggtataatcaactattgaggaggaagtagacatgaaaaaattttttacaaataaattttggttaggcgttgtctcactctttctggctattttattatttttaacggcaactgcaacaagtatgaaccatcaagacaatagtaagattgcaggagcgtctgagacatatacacataccctaacagatgtgccaatagacatcaaatacgatagtgatgattactttattagtggatattcttatggggcagatgtctatatgtcatcggttaatcgtgttaagttagattctgaaataaatgaggatacacgaaaatttaaagtagtcgccgatttgacaaatatgaaaccagggactcacaaagtcccactaaaggtagtaaatttgccatctggtgtaaatgctacggtttctccaacaacaattacagtaactatgggtaaaaagaaaacaaaagagtttccggtttatggacatgttaatgataagcaaattaaagctggttatgcagtcgataagatgtcagttgatgtgtcaaaagttaaagttactagtgatgaatctattatagatcgtattgaccatgtcgctgccaatatccctgatgataaagttcttgatgatgattttaacaagacagttactttacaagctgtaacagcagatggtacagtattagcaagtattattcacccttctaaagcaactttatctgtcaaagtaaaaaaattgaccaagacagtaccgattaatttgataccagtaggacaattcagcgatagtatttcaaaaattaactacaagttgagtcaagaaaaagcagtaatttcaggaacaaaagaggctttagaagctatttctgttattaatgctgaggtagatatttcagacgtaactaaaaatacagaaaagaaaattaatctttctgcaaacaatgtttcagttgatcctgctcaagtaacagttcaattgacaactactaaaaaataatagataataaaaacgaaaaaaatggaggtagcgtttttcgctagaaaaaaattatgggaaaatattttggtacagatggtgttcgcggtgaagctaatgttgaactgacgccagaattggcttttaaattaggacgttttggaggatatgttctaagtcaacacgaaactgatcgtccgagagtttttgtagctcgtgatactcgtatttctggtgaaatgctggaatctgctttgattgctggtctactttcagtaggtattgaggtttataaacttggtgttttagccactcctggagtgtcttaccttgtccgtacagaaaaagctagtgcaggggttatgatttcagcaagccacaatccagcacttgataatggtattaagttctttggtagtgatggttttaaacttgatgatgatcgtgaattagaaattgaagctttacttgatgcgaaggaagacactttaccacgtccatcagcacaaggtttaggtactttagtagattatcctgaaggacttcggaaatatgagaagtttatggaatcaactggtattgatttagaaggtatgaaggttgcgttggatacagcaaatggagcagcaacagcctcagctcggaatatctttttagacttgaatgctgatataagtgttattggtgatcaaccagatggtttgaatatcaatgatggtgttggttcgacacatcctgagcaattacaaagtttagttagagaaaatggttccgacatcggtctagcttttgatggtgatagtgatcgtttgatcgctgttgatgaaaatggagagattgtagatggtgataaaattatgtttatcattgggaaatatctctctgataaagggcagcttgctcagaatacaatcgtaacaacggttatgtcaaatctcggctttcataaagcgctcgaccgtgaaggaattcataaagcgattaccgctgtaggagaccgctacgtggttgaagaaatgcgtaaatcaggatataatcttggcggagagcaatcaggccacgttattatcatggattacaatactacaggggatggacaattaacagccatccaattgactaaggtcatgaaagaaactggtaagaaattatcagagttagctagtgaagtgacgatttatcctcaaaaattagtaaatattcgtgttgaaaataacatgaaagataaagcgatggaagttcctgcaattgcggaaattattgctaaaatggaagaagagatggatggcaatggtcgtattctagtacgtcctagtggtactgagcctcttcttagagttatggcagaagcgccaacaaatgaagcggttgattattatgttgatactatcgcagatgtcgttcgtacagaaattggtttagattaaaacggcgttattctgctataaagtcgtcaatgttataaaataataaagagatggaattggagtggagcatcaagcatacgcctttctctctctttttgatttgagaagggagtttagagaaaatgactaaagaagcagaattattatgggctaaacacaagtatttagtcttaagtaaatctcagaaaatttatttggatattagacaaactttgaaatcaccaaattgtaccgttttagacgttcagtcactcattgaccaagcagtgcttttagaagaatcaccatcacaagtgactaatgcttatatgcatatatggggctattttaaaaataaggcagagcgtcaagaaaaagaagaatttttaaccttgctggaaaaatacaggaaaacaggttatcaacgaagaaaactgttagcttttctaaaacagctattagctaaatacccaaattcttatttacaaaactcttctattttcgaagaagagtaaaagattgatagttgaggtatataaatgagattatggcatcaagatattattgagttattgcctaggcagcaacttttaggacagcatagagagtgttgtgcattgagagggaatgggtgggggagaaaacatgagactgttgattatgtttttcgatattcaccttataggttatttgcatatcatcaattagttatggaagaaatgatggagcgtgggtatcgtgtatctaaagaatggctaattgcagaatataggggaatgaagtgcccaagatatgatacacttaatcctgttgacttggagacacctatctatcccgagcacaatcaagactatctacaagaatgtctatggaatttaaaagcaaaaggaattgaccttcctataaataagataaaatagagatttatctctattttattttggaataaaaagctatattatcaagttttagaggagtgtttttttaagggcaaagtggtaaaatagaaacatgttaaagaaaccaacctcagcatatgtacacattccattttgtacccaaatatgttattattgtgatttttcaaaagtttttattaaaaatcagcctgtagacgcttatcttcaggctcttatccgtgaatttcggtcttatgatattacagaattgcgcaccttatatattggaggagggacacctacatctataagcgctgtgcaactggactatttattgacggagttaagtagagatttaaacttaaatactttagaggagttcactatcgaagctaatccaggagatttaaccgttgataaaatagaggtgcttcaaaagtcagctgtcaatagagtttctctaggagttcagacctttaatgataaacatttaaagcgtattggacgcagtcacaatgaggcacaaatttattctacaattgatgctcttaaaacagctggttttcaaaatatctctattgacctaatttatgccttacctggacaaacgatggatgatgttagaagtaatgtagccaaagctctctctctaaatattcctcatttgagtttatatagtttaattttagaacaccatactgtatttatgaataaaatgcgtcgtgggaaattacatttgccaacagaagatttagaagccgagatgtttgaatatatcatttctgaaatggaaagaaatggttttgagcattatgaaatttctaattttacaaagccgggttttgaaagtcgtcataatttgatgtactgggataatgtagaatattatggtgttggtgcaggcgcttctggttatcttgatggtattcgttatcgtaatagagggccaatacaacattatctaaagggggtttcagaaggtaatgcaaggttatctgaagaagtattatcaaaaaatgaaatgatggaagaggagcttttcctcggtcttcgtaaaaaagagggtgtttccatcggaaaatttgaacaaaaatttggaacgtcctttgagaaacgttacggtcagattgttcaagaactccaaagtgatgggcttttgaaagaaaataatggttttatccagatgactaaaaaaggtctcttcttaggagatacggttgccgagaaatttattgtggagtaaaaaatgggtttattatatcgagaaacttacgaagtgcctttttatgaatcagacactaatcattatatgaaattaccgcagttgttggctttagcgttacaaatttcagccaaacaatctttaaaattaggaataggcgatgacatcgtttttaaaagatacggattggtttgggtcgttacagattatattattgatattgagcgtttacccaagcatgctgaaaagatagtcattgagactgaagccaaagctcataataaattattgtgttaccgctatttttatatttatggtgaagacgggcaaaaaataataacgatttcatctgcttttgtcttaatggattttaaaacacggaagattcatcctgttcttgatgatattacttcaatttaccaatcccaaagaatcaaaaaagttattcgagggccgaaatatcatcccattggagatagtaaagttaaacaataccatgttcgttattttgatttagatatgaatggacatgttaataatagtaagtatctagaatggatgtatgatgtgttggacttagattttctaagtagccacattcctaaaaaaattgatttaaaatatattaaggaaattcaatatggaacggatattaagtctcattggtatcaagatggtcttgtgacacgtcatgatattattggtggcgatgctattcatgctcaagctaggattgaatggcaggaaaaaaaggaggattaaatggcttataaaggatatcttattgatttagatggtactatttacaaagggaaaagtcgtatcccagcaggagagcgttttatcgaacgtttgcaagaaaaaggcattccttatatgttagtaactaataatacgactcgtacaccagaaagcgttcaggaaatgcttcgaggcttcaatgttgaaacaccacttgaaacaatctataccgcaactatggctacggttgactatatgaatgatatgaaccgtggaaaaacagcttacgttattggtgaagaagggcttaaaaaagctattgcagatgcaggttatgtggaggatacaaaaaatccagcctatgtggttgttggtttagattggaatgttacttatgataaattggcaactgctacgttagcaattcaaaatggtgctttatttattggaaccaatccagatttgaatattcctactgaacgtggtttattacccggtgctggctccttaaatgctttattagaagccgcaacgcgtataaaaccagtctttattggaaagccaaatgccatcattatgaataaggcacttgaaattttaaatattcctagaaatcaagcagtcatggtcggtgataattatttgacagatatcatggctggtattaataatgatattgatactttgttagtaacaacgggttttacaacagttgaagaagtaccagatttaccaattcaaccaagttatgttttagcaagtttagatgaatggacatttaatgaaggataagttattagtagttttaacttggatttggattatatcgttagcaactctagctacaatttatattgcttggttgatctatcctatagaaattcagtttttaaaattagaaaaggttgtgtatttaaaggctgaaacaatttattataattttaataagttgatgatatatctgactcatccttttatctctgatttaaatatgcccagctttccttcttcagaggatggtttaaagcattttgcggatgtaaaatatctttttactctagcgcatgggctttttgttatactaacttttccagttatttattttttaagacgtggatggaagcaaaaaagtatctttctatatgaaggctttttcaagatagctattatgttgcctatttttattgtagtatgtgcctttctgttgggttttgaccagtttttcactctatttcatgaggtgctttttccaggagattctacttggcaatttaatcctctaacggatccagtaatttggatacttcctgaaacttttttcctccattgtttcatcatttttttgttaatctatgaaacaataactataattcttttgataataggtagaaaacatttaaaattaagaaaatataaaaacaaaatgcaagccttataatagcgcttgcattttgtttgctatttttttataatacaaatatgagaaatgtcggaattataacaatgacataaaaaagcaccgaatcggtgctcactttttcaagctgaatacggactggattaaaaatcactgccttattttaacgtgctgtgctgtttcgaataattccaacaaaattattatatgttattttagtgtaataatcaagtaaaaaataaaaatcagcaaagctttaaaacttaaaacatactttaggatattttaacaaataacagatgaaagataaagataatgcttttaaaattcaaaaaaataatatataattaaagtatgttttaaaggtgttgtttttagaatggtgttttaaataaaaggagaaaagttatgaataagccatattcaataggccttgacatcggtactaattccgtcggatggagcattattacagatgattataaagtacctgctaagaagatgagagttttagggaacactgataaagaatatattaagaagaatctcataggtgctctgctttttgatggcgggaatactgctgcagatagacgcttgaagcgaactgctcgtcgtcgttatacacgtcgtagaaatcgtattctatatttacaagaaatttttgcagaggaaatgagtaaagttgatgatagtttctttcatcgattagaggattcttttctagttgaggaagataagagagggagcaagtatcctatctttgcaacattgcaggaagagaaagattatcatgaaaaattttcgacaatctatcatttgagaaaagaattagctgacaagaaagaaaaagcagaccttcgtcttatttatattgctctagctcatatcattaaatttagagggcatttcctaattgaggatgatagctttgatgtcaggaatacagacatttcaaaacaatatcaagattttttagaaatctttaatacaacttttgaaaataatgatttgttatctcaaaacgttgacgtagaggcaatactaacagataagattagcaagtctgcgaagaaagatcgtattttagcgcagtatcctaaccaaaaatctactggcatttttgcagaatttttgaaattgattgtcggaaatcaagctgacttcaagaaatatttcaatttggaggataaaacgccgcttcaattcgctaaggatagctacgatgaagatttagaaaatcttcttggacagattggtgatgaatttgcagacttattctcagcagcgaaaaagttatatgatagtgtccttttgtctggcattcttacagtaatcgacctcagtaccaaggcgccactttcagcttctatgattcagcgttatgatgaacatagagaggacttgaaacagttaaaacaattcgtaaaagcttcattgccggaaaaatatcaagaaatatttgctgattcatcaaaagatggctacgctggttatattgaaggtaaaactaatcaagaagctttttataaatacctgtcaaaattgttgaccaagcaagaagatagcgagaattttcttgaaaaaatcaagaatgaagatttcttgagaaaacaaaggacctttgataatggctcaattccacaccaagtccatttgacagagctgaaagctattatccgccgtcaatcagaatactatcccttcttgaaagagaatcaagataggattgaaaaaatccttacctttagaattccttattatatcgggccactagcacgtgagaagagtgattttgcatggatgactcgcaaaacagatgacagtattcgaccttggaattttgaagacttggttgataaagaaaaatctgcggaagcttttatccatcgtatgaccaacaatgatttttatcttcctgaagaaaaagttttaccaaagcatagtcttatttatgaaaaatttacggtctataatgagttgactaaggttagatataaaaatgagcaaggtgagacttatttttttgatagcaatattaaacaagaaatctttgatggagtattcaaggaacatcgtaaggtatccaagaagaagttgctagattttctggctaaagaatatgaggagtttaggatagtagatgttattggtctagataaagaaaataaagctttcaacgcctcattgggaacttaccacgatctcgaaaaaatactagacaaagattttctagataatccagataatgagtctattctggaagatatcgtccaaactctaacattatttgaagacagagaaatgattaagaagcgtcttgaaaactataaagatctttttacagagtcacaactaaaaaaactctatcgtcgtcactatactggctggggacgattgtctgctaagttaatcaatggtattcgagataaagagagtcaaaaaacaatcttggactatcttattgatgatggtagatctaatcgcaactttatgcagttgataaatgatgatggtctatctttcaaatcaattatcagtaaggcacaggctggtagtcattcagataatctaaaagaagttgtaggtgagcttgcaggtagccctgctattaaaaagggaattctacaaagtttgaaaattgttgatgagcttgttaaagtcatgggatacgaacctgaacaaattgtggttgagatggcgcgtgagaatcaaacaacaaatcaaggtcgtcgtaactctcgacaacgctataaacttcttgatgatggcgttaagaatctagctagtgacttgaatggcaatattttgaaagaatatcctacggataatcaagcgttgcaaaatgaaagacttttcctttactacttacaaaacggaagagatatgtatacaggggaagctctagatattgacaatttaagtcaatatgatattgaccacattattcctcaagctttcataaaagatgattctattgataatcgtgttttggtatcatctgctaaaaatcgtggaaagtcagatgatgttcctagccttgaaattgtaaaagattgtaaagttttctggaaaaaattacttgatgctaagttaatgagtcagcgtaagtatgataatttgactaaggcagagcgcggaggcctaacttccgatgataaggcaagatttatccaacgtcagttggttgagacacgacaaattaccaagcatgttgcccgtatcttggatgaacgctttaataatgagcttgatagtaaaggtagaaggatccgcaaagttaaaattgtaaccttgaagtcaaatttggtttcaaatttccgaaaagaatttggattctataaaattcgtgaagttaacaattatcaccatgcacatgatgcctatcttaatgcagtagttgctaaagctattctaaccaaatatcctcagttagagccagaatttgtctacggcgactatccaaaatataatagttacaaaacgcgtaaatccgctacagaaaagctatttttctattcaaatattatgaacttctttaaaactaaggtaactttagcggatggaaccgttgttgtaaaagatgatattgaagttaataatgatacgggtgaaattgtttgggataaaaagaaacactttgcgacagttagaaaagtcttgtcataccctcagaacaatatcgtgaagaagacagagattcagacaggtggtttctctaaggaatcaatcttggcgcatggtaactcagataagttgattccaagaaaaacgaaggatatttatttagatcctaagaaatatggaggttttgatagtccgatagtagcttactctgttttagttgtagctgatatcaaaaagggtaaagcacaaaaactaaaaacagttacggaacttttaggaattaccatcatggagaggtccagatttgagaaaaatccatcagctttccttgaatcaaaaggctatttaaatattagggctgataaactaattattttgcccaagtatagtctgttcgaattagaaaatgggcgtcgtcgattacttgctagtgctggtgaattacaaaaaggtaatgagctagccttaccaacacaatttatgaagttcttataccttgcaagtcgttataatgagtcaaaaggtaaaccagaggagattgagaagaaacaagaatttgtaaatcaacatgtctcttattttgatgacatccttcaattaattaatgatttttcaaaacgagttattctagcagatgctaatttagagaaaatcaataagctttaccaagataataaggaaaatatatcagtagatgaacttgctaataatattatcaatctatttacttttaccagtctaggagctccagcagcttttaaattttttgataaaatagttgatagaaaacgctatacatcaactaaagaagtacttaattctaccctaattcatcaatctattactggactttatgaaacacgtattgatttgggtaagttaggagaagattgatatggcaggttggcgaaccgttgttgtaaatacacattctaagctctcttataaaaataatcatctgatttttaaagattcttatcagacggaaatgattcatctatcagagattgacattctaatcatggaaacaacagatatcgttttgtcgaccatgctgattaaacgtttggttgatgaaaatattttagttatattttgtgacgataaacgcttgccaacagctatgttaatgccgtactatgccagacatgattcgagtttacaattatctaggcagatgtcatggattgaagatgtcaaagcagatgtttggacatcaattattgcacaaaaaattttgaatcagtctttttatctcggtgagtgttctttctttgaaaaatcccagtctattatgaatctctaccatgacttagaaccttttgatccttctaatcgtgaggggcatgctgctaggatttatttcaatacactttttggaaatgatttttcaagagagcaggataatccaataaatgctggtttagactacggatattcattgcttttgagtatgtttgcgcgtgaagttgttaagtgtggttgcatgacacaatttggcttgaagcatgctaatcaatttaatcagttcaacctagcaagcgatattatggaaccatttcgcccaatcgttgataggattatttatgaaaataggcagagtgattttgtcaaaatgaaaagagaactcttttctatgttttcagagacatacagctacaatggtaaagaaatgtatctctcaaatattgtcagcgactataccaaaaaagttattaagtcgctaaatagtgatgggaatggaattccggagtttaggatatgagttatcggtatatgcgaatgattttaatgtttgatatgcctactgaaacagcagaagaacggaaggcgtatcgtaagtttagaaagtttctcttgagcgaaggctttatcatgcatcagttttctgtttatagtaaattattactcaataatacagctaataatgctatgataggtcggcttaaagtgaataatcctaaaaagggtaatatcacactcttaacagttacggaaaaacaatttgcgagaatggtttacctccatggagaacgcaacacaagtgttgccaactctgatagtcgcttggttttcctaggagattcttatgatcaagattaattttccaattttagatgaaccattagtgttaagtaatgctacgattttaacgatagaagatgtttcagtttattcttcattggtgaaacatttttatcaatatgacgtagatgaacatttgaaattatttgatgataagcagaaaagtctgaaggcaacagagttaatgctggttacagatatcttaggatacgatgtcaactcagcacctattctaaagttgatacatggtgacttagaaaatcaattcaacgaaaagccagaagtgaaatcaatggtagaaaaattagcagctactattacagaacttatcgcatttgagtgtctagagaatgagcttgatttagaatacgatgaaattaagattttagaactcattaaggcactgggagtcaaaattgagacacagagcgacactatctttgaaaaatgttttgaaattatacaagtttaccattatttaacgaaaaagaatctcttggtttttgttaatagcggagcttatcttaccaaagatgaagttataaaattatgtgaatacatcaatttaatgcaaaagtcagtactctttctagaacctagaagactctatgatttaccgcaatatgttattgataaggattatttcttgataggcgaaaatatggtataatattagtaaaagcacagtaataacaaggaatcatcgaaactgaagtcctgctgagacgaatggcgcgattacgaaagctcaaaagaaaattttctacgaggttttagagctgtgctgtttcgaatggttccaaaactaattgccaatgcttacaatatcttcgtcagttttagagctgtgctgtttcgaatggttccaaaacatgttctgaattacctttctcgacactccggttttagagctgtgctgtttcgaatggttccaaaacaccatcaaggctcttatctgcagattgttagttttagagctgtgctgtttcgaatggttccaaaacaaatggttgccaatgactttctagagtgatgttttagagctgtgctgtttcgaatggttccaaaacacaaaatcttttgttgctcctggacgtattgttttagagctgtgctgtttcgaatggttccaaaacatgtaaggtattgtaaaacttcttcttgcggttttagagctgtgctgtttcgaatggttccaaaacactgttcctataattaaaataaaagaggtagttttagagctgtgctgtttcgaatggttccaaaactgttccagtaaaaagtaattttaaagcattgttttagagctgtgctgtttcgaatggttccaaaaccgctcgattgatgctatcaactatattgaagttttagagctgtgctgtttcgaatggttccaaaacttcttcaagagaacttgtagaacagcttcagttttagagctgtgctgtttcgaatggttccaaaacaaggtacttttagcttgttcttgtggtgttgttttagagctgtgctgtttcgaatggttccaaaacacagctactgtaaattctgcttttacggttgttttagagctgtgctgtttcgaatggttccaaaactagtgcagttgtcaaggagattgtgagcgagttttagagctgtgctgtttcgaatggttccaaaactttaacctttgaaaatgtgaaaggctcgtagttttagagctgtgctgtttcgaatggttccaaaacgcgatgatggtaagtcatcatggacagcgtgttttagagctgtgctgtttcgaatggttccaaaacttttacacacgatgtcagatataatgtcaagttttagagctgtgctgtttcgaatggttccaaaacagtactgcactaggaattgtagagatcaaagttttagagctgtgctgtttcgaatggttccaaaaccgtaccatctatcaatttaccgcaagctgtgttttagagctgtgctgtttcgaatggttccaaaacttaaaagatttaaactatcaagcgtcaattgttttagagctgtgctgtttcgaatggttccaaaacttctaaatgctggtgactgctttgcataaagttttagagctgtgctgtttcgaatggttccaaaacttgctgctagacccaaacagtttatttttaggttttagagctgtgctgtttcgaatggttccaaaactccttttttagataatgtgcgatcacggacgttttagagctgtgctgtttcgaatggttccaaaacttttaccaatgcttccatatcgcttatatgttttagagctgtgctgtttcgaatggttccaaaactggttatacatttactaatccatcagcattgttttagagctgtgctgtttcgaatggttccaaaacaagctaattctcatctcaccgagatggatagttttagagctgtgctgttattatgctaggacatcattgtggtgttctagttttttgttatactgaaataaattttcagagaatgtgggggaaggcggtaattagattaattcaagacgtaattcagaacttagttggccaagctaacgaaatcaccccaatttatcagtttgattgggaaacttatatattggcgactaaaaaatatgaacgtcatttagaggtgtgtctattagtagaaaattcgaattgtttttcggattcaaagataatgtgtcaataaaagagatatgaaaggctataattccaaccttatggttaaagggctaggttgttctacgctttacttaattattagtttgacagcgttggttcttttagtgattgctggtgttttctttgtcattaatacttgcaagcttacaaggaaagcagtggagaacctatccataatcaactaacagctatgatggatctcacctattaatatagttaaggagtgtccaatactccttttttgaaatacagttggaagttacagaaaacatattttcatgttataatagtggagaaagaaatgaggtgctaatattatggaacaaaccttttttatgataaaacctgatggtgtaaaacgtggttttattggagaagttattagtcgtattgagcgtcgaggcttctctattgatcgcttagaggttagatatgcagatgcagatattttgaaaagacattatgcagaactgacggatagaccattctttccaacattagtagattatatgactagtggtccagtaatcattggagttatttcgggagaagaggtcatttcaacttggcgcaccatgatggggagtactaaccccaaagatgcccttccaggaactattcgaggagattttgcacaagctccctctccaaaccaagcgacatgtaatattgttcatgggtcagactcacctgaatctgcaactcgcgagatagccatttggttcaataactaatagacttaatgaagattgatgttcaagtgttaattctcttttacatcggtcttctttttgatataatattctagagtctataggactgttttaatactttagaagttaaacatatcaaattgtataggaaatagaatgaatattgaagatttgaagaaacgtcaagaaaagattagaaacttttcgattatcgctcatattgaccatggaaaatcaaccttagcagaccgtattttagagaaaacagaaacggtttctagtcgtgaaatgcaggcgcaactgttggactctatggatctagaacgtgagcgtggaattactataaagttaaatgctattgagcttaattatactgctaaagatggtgaaacttacatttttcacttgattgacacgccagggcatgttgacttcacatatgaagtatcacgttcattggcagcttgtgagggtgctatactggttgttgatgcagcccaaggaattgaagctcaaactctggcaaatgtttatttggctctagacaatgatttagagatactaccagttattaataaaattgatttaccagcagcagatccagaacgtgtacgtgcagaagtagaggatgttattggtctagatgcttcagaagctgtgcttgcctcagctaaggcagggattggtattgaagaaattttagagcagatcgttgaaaaagttcctgcaccgactggggaagtagatgctcctcttcaagctctaatttttgattctgtttatgatgcttatcgtggagtaattcttcaagtaaggattgtaaatggtatggttaagccaggagataagattcaaatgatgtctaatggtaaaaccttcgacgttactgaggttggtattttcactcccaaagcagttggacgtgattttttagcaactggagatgtagggtatattgctgcctcaattaaaacggttgctgatacacgtgttggtgataccattacccttgctaataacccagcaatagaacccttgcatggctataagcaaatgaacccaatggtttttgccggtctttatccaattgaatcaaataagtataacgatctgcgtgaagcccttgaaaaattacaattgaatgatgctagtctacagtttgaaccggaaacatcacaagcattagggtttggtttccgttgtggtttcttaggacttttacatatggacgttatccaagagcgcttggaacgagagttcaatattgatcttattatgactgcaccatcagtagtttatcatgttaatacaactgacggtgaaatgcttgaagtttcgaatccatctgaatttcctgatcctactcgtgttgacagcattgaagaaccatatgttaaggcgcaaattatggttcctcaagaatttgtcggtgctgtaatggagttagcacaacgtaaacgtggtgactttgtaacaatggattatattgatgataatcgtgttaatgttatttaccaaattcctttagctgaaattgtgtttgacttctttgataagcttaaatcatcaacacgtggctatgctagttttgattatgaaatttccgaatatcgtcgctcacaattagttaaaatggatattcttttaaatggtgataaagtggatgctttaagctttattgttcacaaagaatttgcctatgaacgtggtaaattgatcgttgataagttgaaaaaaatcattcctcgtcagcagtttgaagttcctatccaagcagctattggacaaaaaattgtggcccgttctgatataaaagcactacgtaaaaatgtcttagcaaaatgttatggtggtgacgtttcacgtaaacgtaagttgcttgaaaaacaaaaagctggtaaaaagcgcatgaaagcaattggttccgtcgaagttcctcaggaagctttcttaagtgttttatcaatggacgatgatgacaaaaaataattcagaaagatgatatcatttatctattttaaagtaacttagcttcgtgcttaagttactttttctttgtctgcaattatcaaataatatggctttataatatatttgtttaaatataaatgagctataaatgagtttttgttagtaactaaataataaaaagatggcaaatagtattgcaaaaagaaaaacatctgatataattaactagttaactaaaacgaaaaaaacatttatggaggactcatgaaaggtcaaaaaattattgctctagctggtcttgtcctgtcatgccattttgctcttacggcatgtcatactcaagaacacaaaaattctcatcatattaaaacaaagcaggttgctaagaaaaaagctaataaaaagaaagtctctgttaaggaaagtcataaaaaacgcaagggtgttgcaggggttgactttccaactgatgatggctttttactgactaaagattcgaagattttatctcatacagattctggaatcgttgtagcacatggaaatcattctcattttattttttactctgatttaaaaggttcaaaatttagctatttaatccctaatgctaatacaaaaactaataaaaatcaagcggtaagaaactttaaagcaggggcggtagctgttaatacattaaatgatggctatgtttttaatcccgcagatattgtttcagaagatgctaatggctacgtggtcagacatggtgatcatttccactatattccaaaagcaagtttatctcagcaaaagcaagtacaagcaagtagagctgtttcacgtttaggaaatcaaagtaatagccattacagggttaatagttctaaaattgcagggcttcactacccaacaagtaatggtttcttatttaatggacgaggaataaaaggcactaccccaacaggtattttagtagaacatcataatcatctgcattttattagttttgctgatttaagaaaaggggggtggggatcaattgctgaccgttaccaaccacaaaagaaagctgattctaaaaaacagtcaccatcaagtaaaaagccaagaactgaaaatactttacctaaggacatcaaagataagctagcttaccttgctcgtgaattacatttagatatttcacgtatcagagtccttaaaacactaaatggtgaaattggatttgaatacccacatgatgatcatacacatgttattatggccaaagatattgatctaagtaagccaattccaaatccacatcatgatgatgaagatcatcacaaaggtcatcaccatgatgagtccgaccataagcatgaagaacacgagcacactaagtcaaataaattatctgatgaagatcaaaagaaattaatttatttagcagagaagcttggtttaaatcctaatcaaattgaagtattaacgtcagaggatggaagtatcatctttaagtatccacatgatgaccactcacacaccatagcaagtaaggatattgaaattgggaagcctatcccagatggacaccacgatcactctcatgcaaaagataaagttggtatggcaactctaaaacaaattggttttgatgatgagattattcaggatattctgcatgcagatgctccaacaccattcccatcaaatgaaactaatcctgaaaaaatgcgtcagtggcttgcaactgttactaagattaacattggacaaagaaccaatccattccagcgttttggtctatcattgatgcctaatattgaagttctaggaattgggtttactccgattaatgatatgacgccagttttgcaattcaaaaaacttaaacagctttggatgacaaatactggtattacagattattctttccttgataagatgccactattagaaggattggatatttcacaaaacggtattaaggatttatctttccttacaaaatataaacaattaagtcttattgctgcagctaataatggcattacttcgctaaaaccattggctgaattaccaaaccttcaattcttagttttgagtcataacaatatctctgacttgacaccgttatcaaacttgacaaaactccaagaattgtaccttgatcataataatgtgaagaatttaagtgcactttctggtaaaaaagatttgaaagttctagatttatcaaacaataaatccgcagacttatcgactctaaaaacaactagtcttgagacgcttcttttaaatgagacgaatacaagcaatctaagtttcttaaagcaaaatcctaaggtatctaatttaacaattaataatgcgaaattagcatcattagatggtattgaagagagcgatgaaattgttaaagtagaagctgaagggaaccaaattaagtcactagtattgaaaaataaacaaggttcgttaaaattcttgaatgtgactaataatcagttaacatcacttgaaggtgttaataattatacttcacttgagaccttaagtgtttctaaaaataaacttgaatctttagatattaaaacacctaacaaaacagttacaaatcttgattttagccataacaatgttccaacatcacaattgaaattgaatgaaaaaaatattcctgaagcagtagctaagaattttccagcagttgtagaaggttcaatggttggaaatggtagtcttgctgaaaaagcagctatggcttctaaagaggacaaacaagtttcagataatactaatcaccaaaaaaacactgaaaaatctgctcaagcgaatgctgatagtaaaaaagaaaaccctaaaacacatgatgaacatcatgaccatgaagaaacagatcatgcacatgtaggtcatcatcaccattaatcttttacagagctaatatataaaatccttcaagaatttcttggaggattttgcatttatatgctaaatcatttatttttttagaaaattagctataatatgactatggttaaaagagaagatgtgattttaaatgcaactgaaaatatggttcaccataaattaaaaaatgatccaagtggccatgactggtttcatattgttagagtaagaaatcttgcggtagaattagcacacaaagaaggggctaatacctttatttgtcaaatggctgcacttttgcatgatattattgatgacaaaatctgccaagatagtaagcaagcgtcgtatgaattgactcaatggttatatagtcaagatcttgccatagcagaagtagaacatatccttgatattcttgaaaatatttcattcaaagcaggaactggattgactatgaaaacattggaaggtcaaattgttcaagatgcagatcgcctagatgctatgggggctattggtattgcaagaacgatggcttattcagggagtaaaggacgtttaattcatgaccctaacttaaaaccacgagaaaacctcactttagaagagtatcgtaatggtcaggatacagctatcattcatttttacgaaaaattattaaagttaaaagaccttatgaatacaaaacaagggaaaatgcttgctcaaaaacgtcatgattttttagaactatatttagccgaattttatgctgaatggaatggtaaacgttaggagtagatatgattcgtagagcgaaagaaaaagatttgcctgatattgcagagctattgaaacaaattttaatgttacatcatgaggttcgcccagatatttttcatacaagaggaagtaagttttctaaagaacaattgaaagaaatgctgatagacgaatcaaagcctatctttgtttatgaatcagacgagggtaaagttgttgcccacttgtttcttcaattacaagaaaaacgtgacttacctcgaaagtcatttaaaactctctatatagatgatttgtgcattgatgaggaagtaagaggtcagcaaattggacaaaagttgatggattttgcaagacaatatgctaagaaacatgggtgttataatataactttaaatgtttggaatgataatcagagagcggtctctttttatgaaaaattaggttttaaacctcaacaaactcaaatggaggagatactataatgaaagaaacacaagaagaattacgtcagcgtattggacatacagcttatcaagtaacccaaaattcagctacggaacatgcttttactgggaagtatgatgatttttttgaagaggggatatatgtagatatcgtcagtggagaggttttattctcttctttagataaatttcaatctggttgtggttggccagcattttcaaaaccaattgagaatcgaatggtgacaaatcatcaagatcactctcatggaatgcatcgtattgaggttaggagtcgtcaagctgactctcatttagggcatgtatttaatgatggaccggttgatgcaggtggtttacgctattgtatcaattcagctgccttagattttattccttatgaccagatggcaaagagaggctatggggactacctatcactttttgattaataagagacgacttaagggtatatcttaagtcgttttttatgtatggtaaaaagaattggtggcaggtgtattcttcatcagtttattttctgaaaaaagagtataatataggtatcaaaaatgaaaacgttttagagaaggagactagaatatggcttctacaaataatgtttcagatacaaacacacgttttgctaaagaggagttagaagaggttttcgaagaattagggacaactcaaggtggtttatcagatgaagaggttgctgtacgtcagaaaaaatatggtttaaacctgttatctgaagtaaagcaagaatcgattattttattgtttctgaaaaattttactagtcttatggcaatactattatgggttggaggatttgtggctattgtttctaatagcttagagctaggtcttgccatttggatggttaatgtgattaatggtatttttagtttcattcaggaataccgtgcaagccaagcaacacaagctctcgagaaaatgttaccatcttattcacgtgttcttagaaaaggctcagaagaaaagatattatcagagcaactagtcccaggcgatattgttcttattgaagaaggagaccgtatttcagcagatggtcgcttgattaaaacaacagatttgcaagtaaaccaatcagccttgacaggggaatcaaatcctatttataaagatagcaatgttgaaaacgaccagtctaaaacattgattgaatgtgataatatggttttcgcaggaacgacggtctccagtggtagcgcaacaatggttgttacggcaattggaatgcaaactcaatttggtcaaatcgctgatttaacacaagggatgaaatcagaaaaaagccctcttcaaagagaacttgatcggttgaccaaacagatttctatcatttcaattacggtaggaattatctttttcttagcagcgactttttttgttaaggagccagtgtcaaaatcatttatctttgccttggggatgatcgttgcatttatcccagaaggtttactacctaccgttacactttctctagctatggcagtccaacgaatggctaaagaacacgcacttgtcaaaaaactttcttcagttgagactcttggagcaacctcagttatctgttctgataagactggtacattaacgcaaaatgaaatgaccgtcaatcatttgtggcaaaatggaaagagttaccaagtgacaggactgggttatgctccagaaggacagattctttttgaaggtgacaatatttgctttggtaatagtgatagaggagacttagaaaaacttattcgttttgctcatctctgtagcaacgctcaagtattaccaccaaatgatgatcgttcaacttatactgtacttggagatccgacagaagcttgtttgaatgttttattggaaaaatcagggataaacatacaagaaaatcgtaagtttgcaccacgtttgaaagaattaccttttgattcggttagaaaacgcatgacaactattcatagcttaggaggcgatgaaaaggataaaaaaatttcaattacaaaaggtgcgccgaaagaaatacttgatttatcagattatgtcttatctgatggcaaagttatccccttaaacaaggaagaacgtaataaaatacagttggctaacgatacatttgctaaagatggacttcgcgtcttagctgtttcatactgcgatattgaaggcttttcaaaagaacaatggacgcaagaaaatttggaacaacacatggtgtttatagggttgatagcaatgagtgatccacctcgtgaaggcgttcgcgaagctattgataaatgtcatgcagcaagcattcgtattattatggtgactggagattacggattaacggcactaagtatcgctaaaaatattggtattattcgtaacgatgatgctaaagtaatttcaggtttagagttatcagaaatgacggatagccaattgaaaaaagaattgtcaggtgaagtcgtttttgctcgtgtagcaccagaacaaaaatatcgagtagtaacgatattacaggagatgggtgaagtagtagcagttacaggagacggggtcaatgatgcgcctgcgctaaaaaaatccgatattggtgtagccatgggtgttaccggtactgatgttgctaaagaatcagctgatatgattctgacagatgatcattttgcttctattgtacatgctgtggaagaaggacgggctgtttatcaaaacattaagaaattcttgacgtatatttttaatagtaatactcctgaggctgttccgtcggcattcttccttttttctaaaggttttattcctttaccattgactgtaatgcaaatacttgctgttgatttgggaaccgatatgcttcccgctttaggtctgggcgtggaaccaccagaaacagacgttatgaatcgtcctccaagacggctaacagatcgcttattggacaaagggctacttataaaatctttcctttggtacggcactattgaatccgtattagctatgggtggttttttctgggctcattacttacgttatggtaattttacttttttcgtcgcaaacggcataccgtacagagaagcgacaactatgacacttggagctattatctttagccagataggtatggttatgaatagcagaacgagctatcaatctattaaagcactatctatttttggtaataaattaattaattttggtataataatggagattttagcatttttagtcttagtatacgtgccactattccataacttattcaacacagcaagcctaggtttatcacattggctctatttaataagctgcccatttatcatgataggtttagatgaagttcggaaattattcagcagtagaaagaataaacggtgatgtcaaatataataacttatttaaaaaataattcaaacttaacttttgatgaattagcattaaacgatgttgacattctttgtttaaatgaatttggctatatttcttttgaaaaacttataaacactacagaaatgaagtcagttttagtctgtgagttatatcatgagtaccttcaaactatggctaaatcatatagctttatgttcacatcacaacgacatgatttatgtcagttaatgatgacctcgaaacgttttaaaaacttaactttatcttattatcgagctgagattagtttagaatttgaaaaacaatttgcagctatggtttttactattcctaacattaattatcatcaggttgtatttcgtggtactgatgccaaccttattggttggaaagaagattttaaattgacttatatgagagaaatatcggctcatcgttcagcgattaaatacttaaatacaatactgccttattttgataaagtagttctctcaggtcattctaaggggggtaatttagccttgtacgctgcaatgtttacaaagccagatttaaaagcaaaaattgatttgatttggcttattgactccccaggactacaaaaaactttgttacctactacagagtataaaactactaaacaaaagtgcattcgcttactaccagaagaatctattgttggtatgatgctttatagtgatatagagccgctaattattagtagcaatgcgcgtggaattctgcaacacgatgttacaacttgggaaattcaagaaccagctattttaaagactggaacaggactatcgctaaaaagtatttgttttgaaaagacatttcaacagtggatggctgaattaaaaagtcaagaaagaaaattattttttgatttattatttgatagcttcctatcaagtggcgtatctagtttggatgacttcaacttggcttccagagcaaaaatgatgaaagcttttcatagctttagagaactagatgatgataaaaaaaggttatttaacaaatctttaaaattattagtaaccatattttggggagcttatcatgataatagcagagagactaagtagctttcctagaattgcattagtctaaacatggtgctaaataaactagcaaaatagcacactaaaaatactactcatattatgctgagtagtatttttagtgtgctatttgatgaagttattctagagtttatgatttttgttttcggaaatactttttagagtattgaagaattccttcttatctgaaaattcgctaatatgttccttaatagcttcatctgaccaattccaccactgagatgcatttaataatgttatttcttcctctgaaaagcgatatttgataattttagcaggtgttccagcgacaacagcatagtcaggaatgtctttggtaataactgaacctgctccaataattgctccattacctattgtaacagatggaagtatagtgacattagttcctatccagacatcgttgccaataataacttttccatttttcttttcatctattaagtccgccctatcctcatttataaatccccttgacttatagtaaataaaagggttagtggtaatgtgatcggttggatgattcagaccagtaatagtaacgttctgggctattgagcaaaatgctccaatttcttttaagttaacgccttcgtaaaagaattgttgatatccatatgtgtactttcctaccgagaatccatatttagggtaactggcaccagtactcatatctgtcctcataggatcatttttaagctctaaacgtttctctaaatgtttttttaaaatactagccataactagcctccaatcgtagactaaatagattataacattttttcctctaaaaaccttaccttttttaataaattctataaattagaatgataaagaacttattctcggatattgacaaagagtgagctaatgaggtggcctaattcaatgttagagtctgttcccagtatttttttcctaagatagaggcaatgtatgaacaaagaaacatacttaaaaccttgtaataacaaggttttaagtatgtatagtaagttatggtaaaatgatatggagccggtgggagtcgaacccacgtccaaacatctgctaatatatttgtctacaactataggttatgtattgatttaactaggtgatgacacataactcaagccctcacatagcgagtctataaatctctttttaactaactagacagtagccaaacgtagtttgctgataaataagaccttctagcaaaacgcaaacaatcttgtgaagatcacgcaggctgttttttaggcagctaatgcgtaagaatttgtattttttgcagttatatttaactggcattttacatctgccgatgagtcgcgaaatatacctcataatgcctgtcgaatccgtaacgaccccaaaagtagaataaagcataaaaacttaccaatatagtataacaaatactatttaaaatagcaaaaatttaacagttgtgttatgattaaagcatgaatatgaaattatcaaaacgttaccgcttttggcagaaggttattaaggctttgggtgtcttagcgttaatagcgactcttgtcttagttgtttatttgtacaaacttggtattttgaatgatagcaatgaattaaaagacctagtacacaagtatgaattttggggtccaatgatttttattgtggctcaaattgtacagattgtttttccagtaattcctggaggtgttacaacagtagcaggtttcttaatttttggtcctaccttaggctttatttataactatattgggattatcatcggaagtgtcatccttttttggttagtcaaattttatggacgaaaattcgttttgctatttatggatcagaagacatttgataaatatgagtctaagctagaaacatccggatatgaaaagttttttatcttttgtatggcatctcccatttcaccagcggacatcatggtgatgattaccggtctatctaatatgtctattaagcgctttgtgacaatcattatgataacgaaacctatttctatcatcggttatagctatttgtggatttatggcggtgatattttgaaaaattttttgaattaaaacaaagtataaatttctaattatctttttatattttcttaaatgctcgtaaagccttattctatgtgctttcgagtatttttactgtaggaagatacttcacgtttctttgcatatttcctcatgtcttagctgtcagaagtggtaaataagtagtaaattcatttgtactactaagcaacaagacgctcctgttgcttctctttattcaagcgtttcatttctgccattgcagaatcgaatgttgcatgtgcgtaatagttcagcgtcatggctatattagcatgtcccataatgtactgtaatgcctttggattcattcctgcatttgcatagttggtacagaatgtatgtcgcaaactatgtggagtgatgtgtggcaatttatcctcgttatacttattgtatttcttaacaagacctttcatcatgccgttgtaatcacttgccacttttggatagttctttctattaagaaagaggaaatcactatatccatcaatctcaacacgcttatcattctttcgattcgctaacactcgcttaaatgcttgataggcttcttcaaccataggaacttgacgttcgccacttttggtctttggtgtttcaatgtagtacccaatttcagtatctctcaatagctgatggtctatattgacaagacgattctcaaaatctaaatctggaagtgtcaaaccaccaaactctgaaatacgaagacctgtttttaagagtatcagaatttcatcataatttttgctgtaggttttatcagcttttgcaaaggctaacagtttttcttcctgttcttctgttagtacggtcttagggacagtatcatcatcaagaactgctttcagttgaaagtcaaatggattcttccgaacacaatcatcttgtatagcaatatagaatgaagcctttaaagaacgtttgtagttattgatggtttgataagcataaccattttcactcattctaatagcccattctttagcgtctgatggcttaatactgtcaatacttcttacacctaacttgtctttcttcaaaatatccataagatatttgcgtccagtttcagtgttttttctaacctttggtctttgagcgttctgttttgcgtaaagctggcagagtgtcattttctttcctacaacatcaataccatcatgaatgtctttctgtaactctgcgattttctctctaagtgagatacaatcacgctttcctgctggtactcggtctgtagccacaagtttccacgagtaaacaaattgcggttctccaaatgaatctatatatttgtataagtatcttccgtcttttcgttggctctctccagtctttaagattcgacctttattgtcacgtcttttttctgacatggcatttgctcctttcctttatggaaagagccttgatacgacttaatactattttatcatatacaagaccctttggcgacgctagattgcgtccaatgtatctataattttttcaaattgttttcgtttaatctgaatacgattgccattcataatcagccaatttgcatttttattttcctctgccaagcgtcgtagcttgttttcgccaatacgaaaatattttgacgcttcttcaatggttagggtataacgttcccaaataggaatgtcagtctgcttcataaaatcctcctttccaaatcacttatttggatttcataaaagttgttttaccagcaatcgaacagctttagcaaagctcacgggagttccacccctgcatggttctcatgtagccatactcattgcctgcgacggttttatcacgctcggactattgactgtatgggagtatcattatcacgataagaatgtcgttgcaggcaatcctgctaaagattgcttctcggatcactaacatgaatcgctcgctatctttataagataggtcatggcggttagttccgttggctcttttcttatcgaaacgtattcgattacttttattcagttttcaaagaacaatggctcgttagcctatcaaaacacattgaaagctcaatatgctttggtggaataacaaacctccctgttcgggaagcgtggaatggtttagcacgcttccacgaaaggagagaggatattacttaatttcaaatgacaaaatctttgtaatcagtctggtttccattcttccacgtaagacttcatcaacgaccatactttgattgccatattcatctttcataagtcgtagggaacgcttcgttatgtaccctctgtaatgatgtagaatctggttaatcgcttcggtatcgccatctgttgcctttacaatgagaggaaagggaatcataggatattgtgttttcattcttcaaattcctccataaactttttaattaaggctagtccactggttctatgccgatagacagtagaacggttcaatttcaacaggtctgcaatttctgaatcgctcatgtccataaagtaaaacagcagtagaatttcacgtttcttgtctggcaactcacgtaatgcttcactcaacaaatcattttcaacgcctactgataacccattgagtgtaaaaatctgaaagtcagttgaatagttatctgttgtcgcaaactggctaacaagataatcgccaacatccgaaaaggacacctcacgctttgcaatccttgaaagataaagcatataattctttcgctcgtcttccatagcacgtttacagatatagtcaaactgattttctattgtggtctgaaaagaagatggtttcatgtttctcaccccctttctgtctaggaaaggaagtgagccttgctcgtttatctcctttcactcttagtcccaatgtgaaagggggatttgttgcattactgataaataaactttgtaaaaaagttctgaatagccaaaaaagcatataaacagatttatttctctgtttacatgcttctgttattctatctatatgatttataaaaccacattggtggacgtacttatctattgcagatagacgactttttttgacaataacccaatgtaaggaaatttattgtatatgatgtacttcatggcgacgttgacctccaacaaaccgccatttggaagtaatatacaatattttaacagcgtaaatagcactaccatataacggttttttttattggcgtttagtagtgctttttattaaatataaacctataaaccatataacacgtttttctatacctgtttttaattcagtaggaacaataaaatgtatagaggtggtctactatgcgtaaaaaagaagataaatatgattttagagcctttggtttagccattaaagaagctcgattgaaacgaggtttaactcgtgaacaagtgggagcattgattgaaattgacccacggtacttaactaatattgaaaataaagggcaacaccccagcatacaagttctttatgaccttgtatcgttacttcatgtttccgttgatgaatttttcttacctgctaataacttggtaaaaagcacccgacgattacagatagagaaatacatggatagctttacagacaaagaactatccttaatggaatctttagccagcggtatcaacgaagcaagaaacatcgaagactaattaaaagaatccatacataacggaaagagccgataaaatgagattgtattaatctcattttatcggctctgcgtctttgcgtctggctctgtaatcacagttactttgaactgctttatttcaattaaattttcttgtctgcatttcggacaatagagggggaatttttttaattcagtatcttcccttatctttaatcgtgttttatttccacatacaggacacaatatccacttgtagtttataataactatctcctcctttacactttaattcaaatctttattaaaaaatatttcatcttatttaacaagaaaccatatttatataacaacataaaatacactaagttattttattgaacatatatcgtactttatctatccgactatttggacgacggggctggcaaacaggttcaccggtagtaacatggtacccttttaactctgttaaacaaacactacgtccatttgtaaagaaagttaaatcactacgatattcttgaatacaccgagcagggatttctccactaagaatgacctcattatttttcaattgagtgtctacgatgttcgcacaatatttaggagcatcgttgtatgctcgtgaaagatattcctgtggcgcataaattttaaaactaagatatggctctaacaattctgttccagctttttttaagacttgttccaatacaataggagcaagcatccgaaaatctgctggggtactaacagggctatagtataagccatacttaaaacagattttacaatccgtcacattccaaccatataatccttgttcgcaaccatagcgtatcccttccataactgcattttgaaatgattgatttaagtatccaagagaaaccgagctctcatactgcattccacttcccaacggaagcggtgatacagataaaccaatggaagcccagaaaggatttggcggcacttcgatgtgaatggtatattctgcattttttaacggtctctccatataaatgactgtaggctcttttagttctatctccacatgatacttttcttgcaacagtgcactaatcacttccatttgtactttccctaagaaagaaagtataatttcatgtgtcgtagaatccacgtaatatcgtagaagcggatcactatctgagatttccaaaagggcatcaagcaacatttctctctgttcaggtttactcggttcaacagttgtttgtagtagagggtgcggattttcaatcttttttctctgtggcaatagttttgtatctccaagaacactatttaacttcaaaaactcattttgcaaaataacaatttctccagaataagctctatcaatcttacataattcaccatttattgaagtatacatttctgtaacttttattttttctttttctgatactctaaccgaatctcgtaaatgtagtactccactataaaggcgtatatatgcaagacgttgtcttttttttgtatattcaattttgaaaacatttccgcaaagttcagacggacctcgatgtgttgatgaataaaatttattcgtaatcacttctataaggttatcaatccctatattgttttttgcacttccgtgataaacagggaacagggaacaattatgaaatcttatgctttcctcttgttcgagttccaatgcttctaatgatttaccggacatatatttctctaaaaggtcatcgtttccctctattaccgtatcccattgttcagattcggtaaagttcgtcacacacatattaggatacagttctaccttctgtttgattacaatttcggcagaaagtttctctttaatatcctgataaaccgttgataaatcaattccattttggtcaatcttattgataaaaaagattgtgggaatccccattttcctaagtgcatgaaataatatacgagtttgtgcttgtacgccatcttttgcagaaatcagtagaattgccccatctaaaactgataatgaacgatatacttctgctaagaaatccatatgtcctggcgtgtctatgatgttcaccttcgtattttcccactgaaaagaggttattcctgtctgaattgtaattcctctctgacgttctaaaagcgtattatccgtcctcgttgtacctttgtccacgcttcctaattctgtaatcgctccactgttatataataagctttctgttaaggtagtttttcctgcatcaacatgagctaaaactccaatattaataattttcatgtgattttcctccattcaaaaacccaaaagggcataaaaatcccagtgataaatacttttatcactgggatttttatgcataaccataggtatacaaagcatacagatattctctggatactttagaatcacatgataaaggtattcttaaactgggtacaaaaaactaagccctcctaaaaaaggacatctaattatttgttcccgctatcaaattgacagtttatttaagaataccttgccgcatatttattaactccttttaaatagtcacttaaataatagcacgtaagagcatatttgtaaaggaatctccaattttttatcaaaaagagtacatgattacaaagtatctgtaatcatgtaccaatatttgttattttacaatcttccaattactcccgttcttttcaagtaccaaatcaaattgagatacctgcgttgctttggtctgctggtcgatatactccactgtcagcgataccgtgacttgattatccttacgattgtgaataggatttaccagttcttgaaagatgtactcttttccgattggttttaatatcccgtcattcacatagtaggaaagttcactggctgtcgctgtaggatagagcttgaagaacgtcgttaaaaactcattgatttcattggttgtaatggaatcaaccgtcccctcactttcaatggcttttggtttataacttgatttcttaggtatgttggtaatggtcggattcttaaccagtaccatatttccagaaccatctacatagacactcactatataagcagagtggacggtctttgtattttctccctctgtaatgagctggtctacactgtaggttacattaaactcattgtcgccagttggctctaccgtccatatctgaaatcctcttacagaagacgatacaggaatatctttgcgtactgtatcaacattgagagcttgaagttcatctgtcagatagccttttagactttccattcgattatcaatggacttatcggattgctcccatgaatagtagactttcgcaaagttctctacaaaattttctacatgatgagtatcaacgtattccttttctatgatagttgtttcgtgaatagtatgagtatctatagctgtaaagtgcttgaatatcgcaaagctgaaactaagccctaaaagtacccacaaggcaatcacaacctttttatgaggattgaccttatagacacgaggtttcttttcctttggtatctgtttttctttattctgattttttctaaatttcatcattaaatcttcctttctcattgtttgattcgtcctgctcccactaaatgctgttgccagtaggggcttgttaagtcggcataaccgattgggtcgcctgcatgaaacatacggttattgccaaggtatatcccaacatgagtaatataagagccagcgttataggtagaatgaaagaaaaccaaatcgccagcttgtgcttccgatagtgggatatgctgggtcacatcatattgctgttgtgcggttcgtggtaagttaattccagcttttccatacgtccattgtgtcagtccgctacaatcaaaagaagtagtcggggaagctccaccgtaaacgtatcgccagccctcatatttcagtgcttcgtccatgatggcttgtaccgtatcatcatcaaactctgttgtgacaagatactgcgttaccagttgcacataaaacatattgccatagttgtatcgccagcccccattgataggtatggctatgggattggggtaagacactttttcgccacctgaatactcttttgagaaactttgagccagttcaaaggtatatttatttccacgattagccacataccctaagaaaccaccaccataattgtaggactggataaccgattctaaatctacactgagcctttcgctactggctaataattcactgaaatacttcacaccttgcttaatggattcttctgtactcaatgaattaggtggaagaccgagggattccgaggactgcataacatcttccgcagtaccgcccgattccacctgtataatcgcaagaagtatgttgacatattcttcaacgccatattctttggcatatttttctaccataggcttatgagccagcacttctgcggaaacattcacacctccataatgaatattggaaattccgctgtcctgttcatctgaaaataaaatggcaacaaacagaagcagtgagaagaccatcaagaataatccagaaccaccaatcactaaagttttcaacttcatggtttcttaccgactttcttaatggtggcggttttgattggtggtctacttcttgtattttgtagtggtactctttgaacagtagacggacgttcttttgtgattggacgttgtgaagttctatctgctgtagtggttgaagttgctggcttttgaacggttttttcttgaacggtattgccttggcgttccacttttggacttgaaaaatcggacttaactgctggacgctcttgtttggcttgttgagattccttatatgaagtctgaatattagactgttttgaggtctgttcatcatgatattgttcttgtcttgtagtcggtctttcatgaacagaagaagcaggctgttttttctgtttgacctgttccatttcagagcgacgcttcgcaatggtttttcgcctttgttcctgctgttccttgcgtccactggctctgtccgctttggtttgagaaatactactggttaaatcacggacattctcttttactttggattttccttgatatactgcatatcttgcattggtcggcaaatctttaacctgttctttcaaaccactagcagtgtctaccattctgtctttggtatcagctactgtaccgatggtttgaccgatacgttttccaagtgttgatttttcctttccgtctggtcgggagtgatctgcttgtgtccttgcagaactccccgaacccgactgtccttttttacctgtaacaatggcagacccagcccctagagtagtcatggaacgtccaagtttccgctgtagacggtgcatgtgagcgtgcataagcatacgaggttttctcatcacacgacttcccacactttgagaatcgttactctgtagagaaaacatactcattaaatcgcccagcttgaagtagattcctgcaaaggtcacaatctgtagaaaagcaatcaaaaagaacggataaccagccgataaggtatagagcatggttgaaatactaaatgctgtcgtaataatcaatgtgattccagctcgtgtcaaaatggtattaaagagctttgttatggctcgttttgacataccatcaaatgatggaatcatgcttaaaataaagctcacaggcagaaacatagcatagatgataaaaagtacctgcgagaaaatcatgattcctgttaataggaatacaaatatggaaatcccaatattgaagacaaataggaagaagactgtacctaaacggttaatggtctttgtaatggttagattggtattgcttctgtcttcaatttcttccgcaacaattttttctctgtcttcgccattgttggaatctgggctggtggagagcaggctttccacacggtcaataccgatactttcaatgtctgaactgttgtattgaagcagtagccacggttgctgaacctgtatggaaaacaggctatctctgattaagtccacgctgtccttgccttgactatcggaatggggcatgacaatcttcgtgccaagtgataaactggcattactgatgtctgatgaaaagtcattgatttttttaatgtagtcgggagcgtaggcaataaaggaagccgataggataaacaccagcacaaaattcataatggcatgaattgcctttgtggtttctctctttatcagtcccgtataggcaacataaaccccaagaaccaaaatcaagagtaagaggaatccaacatagaaaccctctgttgaaaatccgtttgcactcacaccagctaaggtctgcatattcttaccaatggaatctgctgtagcggaaatgaagtctaaggaataggcttcctgtactaagtaacctgtcgcattggaaacatacaaactgattgtccaaataaaattggtaatggcatatagtccatacatgacctgttttccaatcccgtccgaccagttccacggaagccagccccagctattatccacataaaaatccagttgatagttttcaagtgggtatcggctgtattcatttgccacattgaccgtatcatctaccaagcccgcagcttgaaccaccgttcccagcatggctaaaagaaaaatggcaatcacaagtgtgaaagccactgtcattgccactttacctagacgtttcagcgtccagtttgattttattctgtttactattgatggtttcacatttacacctcttttcgcacaggtggtctggtatcaaaggcatggagcagttcttcaaatacagggtggaactgtatcacaccgacacgaccatataaatcactgataaggcattgcccgttttccaaatcacgcaatcgcttctgattgttttcgtcctctgggtctacaccaaaaaaggctaaggtctttttaatctcgttaaggtcagtggaacgaaatgcaaattttaagccgaggttatttttcagtttttcatctaagaggtcgtctgtattttgggtcacgaaatataccccagcgttcatagcacgaccagcccgaaccagcttcatagatagtgtttttccttgtgctacctgtaaaaagctccatgcttcgtctaaatctacaatcttgaaaatgcttcggtctgtatggataaagtctaaagcaaaggtactaatgacaatcagcatagcaacggataaaagctccatagtggtatattcctcaaaggaagtttccttgtcgggaagtaccaagtccgcaacctgtataatgttcagttgtttttctaagctgatagactgctccacataaccattactgaataataaatgtgcaaagtcatagtctgtaaaactttcgatatggtcggctatactggtacttagtggcgtattctcaacccgtaattcctcaatcactttcatcaaccctcgtacttcactattggttactgcacgaatggcttttctaaggattgggaagcgttccccatcacgagaggaaatccccgtaaggaatgtcagaatatcaatagccagtgattcagaatctttgggatttttcataatcacataagggtcaagtaagcctttgtttttctcatcagaagtcagagtgacgatattgatttcatgggaaatctctggcaaggtttctttccatctgccacgttctgcttttgggtctacaatcactgcttgtgccccataaagcaccgcataatagacgataaggttattcgcaaaggatttaccaccacccagcgaaccaacaaaagccgacgctaacgcattggttactgaacccttaaccccttgactggcaagagcaggtttcagatagacattgcgtccagtatctaagctgtagccaacataaatcccctcattttcccccagcatttgagtagcaccaaaacctaaaccagcgaggaaatcagaggtcacgtattgaatataatcattcatataacgcttgctggcaggtaaaaattcttcatgtaagccgagcatatccccaaatggtcgtaccagttttacgcttaaatcgtcataaaaatctttcacttcattacaacgacgtttgagttcgtcaagatcatttgctgatacccttaccacataagacagcttgtacatagattccttgctttggtctaaattggtttccagctcattcacactttccagagcttccgccacattggagctggtttcattatcactttgccaagcgtggttatccaagtctttcagttctttctttttttgcggacagtagatagggctttacgattcgctacaatttccacattcattgacgtatcaatcgggaatgtaaattgctgttgctggtagtagaagatttcagaggacgggaagtccagttctccgacaatgctgttaatggtaaagtaagctacatagacggtttcatcttcctgctggattttcaaatatcgctgtttttcttccaccaaacagcgagtaggcttaatcaagtcatagtatttaatcagcgtttcattatccagctttttctttgatagatggtactcatactcttcataggcagtgcctgtctgtccgtaaaggtgttcaatcagatagccgaagtcgtccttatctaacctgcggattttgaaacgacgagagattttattttctaagagcttttccatcttctgaaaacgcaggatttcatcattactcatactaacaaaatcgcccatcagcttatggttcacatcatagacaaaatcagacaaagcattttttgcttcaacggtaagacttttcatagaaaactcctgatcgttgagaagcaacttaaagccgataaagaaacggtagttcacttgattttcgccaatcatggatattaaagcgtctgtctgttggtcgattttgtcataggcaaccgctttgagcttgccagtgacttcatttttggaacgctcttgtgcagaacgtatgctggattctgtactgatttgtaaagcatgaattttgccatcacgattttgtgcgataagctgtctgaaagaatcatgcacttgtattttctgttctggacttagaaatgagtaattgtaaggaacaagctcatagtaagcataacattccccgtctttattccagacgagattgttttcaatgtatttaattggatatgccataaaattcactcctaactgctgtaatggcttcttgtggctggtttctgccaagcgttactttttttcctgcataggtcagctttggtcgcagtgcataagcaatgacagacttcaaaaatccataaggctttttaccatcaaaagtttttgtagacataaaccatgtgaaagccacaggaatcccaaagtatttgagaaatgctccctctatcatggaaagagggggcaagttgccaagtatcatcactgcaaagagtgacacgacaaaccatgtcatttgcgtaaaggttatgggaaacggaagtctaaaatcattgatagaatacagtaccttttccacagaccagatactggtatagcttcgtattttcttcatgtaatcaatcctttcataaaaaataggggtagctgattgagccaccccgtaaaatagaaaatctgccagtagtaatgtaccgacagatttaatagacgatttcaaaaatcccatgattggttgagataaacgttcctgaaaggtctaaatcccgaccataggcttgataatcaatatagttttgaagactagctggtacttcgcctaaagcacccgtttcttcaatgtagtagcgtgccacgtcatacatatcatcacaatcggaatgaatgataatatcctcttgatgttcgcttagttcttcaatgcttgaaaaatgagtgagcagagcagatagctccgattgtaattcttcgggtaattccgataccatttcccatagtcgattgagttcgccaatggaagtgtattcgtcaaccgtaaagggtaactcgtagtcatgaatggcgtattcctcatattcatcattcaagccgattttctctttgacttcctcaaagtcaatgggaaaggtaaaccacgcaccgaccaattcgccctcattgtatttgcctaaattcgcaatatagacttgcatatcgtccatatattcacgtcctttctttgtagagattcaaaaatccctaccgcacttcgtttggtgtaccattcctttgcggaacataagaaaaccacttatattccacaaaagaacggttttatttaagcaccaataatgcgattgaatagctctagtaaaatgtcttttactccagcagcgttgaagactaagccaaccgcaataatcgcaataattaaaaagccaatcagtttgctaaactcacgcttgaagccaagatacaagccaatcacaacgattgctaaaagcaccagtgattgagcgtttgatagaaaccagttataaaggttttgtccaaaattcataaaaatgttctcctctctatattcaatgaatttgtatttgagttatttttttgttgttatcacgtcctgttcttttactgactgttgcttcaaaatctgcttgtgtcggtctgtcagtttcgcatggtcgagaatgtcttttacaacctgcgtctggttgatttcatcaagtttaatcgcaacctttaaggtcggggcaacttgatgagatagccagttcagcgtcctttggaaggagtaaggctctggttttgtggttagttttaatcgttcacgattgttcccaataaaccaagcccattcttcattcagtttccaatcagaacgaggtttggaatcgtctttatctacaaaacggatataccgattgataattttaaaggcggtatgctctggattgtcatagacgagtaaatcacggactgcataataggcacgctcatttttcaatcgaatctcaaaacggttttttacttctgcgtcttcaatgggaatatcatttttcttgtactgctcgtagtccttttcatagatacagaaataaacttcactttgtaatgaaccgatatagagggtgtttcccatacattccttttcctctttgcgtaccagttcgccactgcgatagcttttaaaactgcggaagacggagatacattcttcctgttggcacttttcagtgagtacagggatatttaaaatccctgtcttatcgttaatggcaaggtcaaggcgtttcatcacaccgccagccaccaaaacgtccataaagaactcataccagcttctttgttgtgccagaagatagctttcaaattgtctgcacccacgacctttcaattccaccagaactcctttgtccagttcatgggagcaaaggacgaatatgtcgcctaaagcataatgctctgaataagaatagaaaccatagtcctcatgaagaaaataggacagtttcagttgtaagatgttttcgaccacctgctgtacgtctgttgtcggaaagcgaattcttacataatcaaacagcatttcaaggggagcgtcgggattgaagcgttccagagcttcccaaagggactgctgtaaatcctctgatggcttgacttttcctgtttcaatatcgcttagatactgccttgtaataccagtcgcaacagctaaacggttttgagatagtccataagccaagcgtttttcttttaaatgctgtaaccaagtttgttcattcagtaaaaatccctccaatcaaaaaggcgtatgtcaacttttaaagcccatttgacatacgctgaaattttgtaaatcccttgtaaccaaaggattttctaatgtttttttgactgtttcctgtcgatttgtacccccctgttagatacggggggttaagtgctggcgtggctattgccacaccagccagcaagatcagtccacacctgcgacttccgcttcgcacgtcgcctgcgtggactgtctgctgttggataactttttaatttcctccaagaaatcatatccttttggtacaaggggagtataaaactctgatatgacacttgttcctacatcaacatagccacgacctttgattcgctttaagaagaaatccttttgtacgtcactgccaaacatcatgccatagcccatttcagacatacgacctaaagccactctgaaattaaactgatcacggattccgtcgcctaaatattttgcgtctggacgttgacaagccagtattagaaagaagccagcttgacgacctaacatgacaatctgtttcagcttattcataactgcggtgttttcttttgttcccagcatttccatgaaagcgacgtattcatcaaagattaagaagtgtgccgggagacctaagtaagcataatttttgccagtcttatagttcttcatctgcttcatttcctcactacgtttcatcatttcttcatagaatgtttcaatgcaagaaagcaagtcttcttttctatagtagacatttgccatcacagaacctaagtccgcaagatcagcatttttcgggtcaagaatatacagttttgaatctgtatgaagcaaggcttcaatcagtgtcagtataaagtaagttttaccgccacctgtaccaccagcaatcaacatatgagggagcttatcatattcccaccatacgtttttcattaagcgaagtttaccatctttagcttctacttcatcaatagaaatacgactggctatggtgtcatagagcaaagtatattccacataggaatcctttaactctttatccgtcagctcacagtacaagccactctctaatttcttttccaagtgtaagagttggtcttgatattttcccagcgtgatttccacccgtatctgtatcaagccatttttaagtcgataatacattttagggaagtaggttatcttttcctttgtacgaccagcactatctttaaagaaaccctctgttttgacctgttcagattcataccacttgttttcaagtatcatctttgccagtttttgacggtggtaaagttgtttaaccgtatcatagcgaacccgtttgaatacaaacgctaccagcaagcagataagaattgcgacactgaaactgataattaaatagggaatgtcaatcttatctgcttgtgataggttaaaatcctgccagttgatctgctggattgtcttcacatgaaacagtccgacaaccagcaggaaaacaggcaggagtgacgctatcgtaaaatgaaagactaaatctttaccagatgggcgaatccttttaccacgctgtttcatgcgaaaaagtctcctttctacctagcgactatttgtcttgtgtcggttctttctttgcttgtggttgagctttgaatgaactagaatcctttgtcagcacaatatcgtctgccttgatataccagtcaacatctgctccttgataggtggcagtagcaacggtgtccgcaatgggattgataagttccacccgtgcgttataatcaaactctttcaaaggcacgctggcaggaatacttacttgaatcatgcgtccttgtcctttggattttaagtcataggtacgttccttgatttcatctgaaaccgacccgtcttcattttggattctcacttcacgacgtagagcagagaatttcaattctccaaaagtcgtgtctttatctaatacaatgccatttgctaatctcatcatttttcctctctttctttattcttttatcatgtcgtcagcatgtaaaaggtaatttgtaaaaccacgagtgccgattttgtagccctctgcggtaatacgtggattgactaacttcacacgttcctcaaagccgaaatgtttttcgccagcttcagcaggaagcaccaccacaatatcatctgctctttgaacatcagaatagagattatagcttcttgataagacagttagccgtccgttgattcttcgctgaacgactttatcctcgccagcaaattctaaattgccgaatgttttttccatgttgggaatcacaaatttaagttccatatttttacctatcctttcttttttattggctgaatgaatgtttgatggtcttaaagagtggggaacgaccttttgattcttgattttttgttttcataagttcacttcctttcaaaatcgggtaaaaaaatagacacctcattttttgaagtgtctacctattaaatattcaaattttattggaagtatctttatatcttcacttttcaaggataaatcgtcgtatcaaagctcattcataagtagtaaattagtagtaaattgagtggttttgaccttgataaagtgtgataagtccagtttttatgcggataactagatttttatgctatttttatttataaaaataaaaaaaggttggagatatatctccaatctttttattgtatattaagtttgtacttaataatagagtgtgtcaacatatagaatatagcaatttcaacaatgctaacaagtatattgtagagcaatacaggttgagagaatgttgcatttgcatgagagttgaataaatcaatatgaaaaatactatctattattaatgttaagaaagtaattaagagtgatattccaaaataagaaacaattcccatcaatacacgtttgtttgtaaataattgccctacagcgatagagagataaatcagtaatgtccctgcaacgtacgatagaaagaaataggcgataaaaagtggagcgttcgaagatgaaataattttatagatttctggaaaagcgacaacgaactgaccaatacctactaaaggtaatatgaccaatatgattccaataatgacaataaaaatattaaaaatactccaaagaagagaagctagtagctttgaacaaataatctgattcgtagttactgggagcgttaaggttagatatccttgacggccgaagatattgctataaaaacgtttgataataatagcaagggtggataacagagatcctgaaataaccatcgctaacaataaaacgagtattatagtgaatatttgggcgctagtactattagtatcagtagaaaaattgccgccaagtgcctttaataccagtcctaaaataatagatactaataaaaccgcagcgttgagtgttagataccacttaccaactgattttaattcatattttaataattttccaaacatatcaatctcctttatttcttgaatctttcacgaaagagagcatcaatcgaacagttgtgctcttctcttaagtcatcagcattgccttgtaggtcaatttctccttctttaaggaagataacttcatcaaggataggttcaatgtcagaaattaagtgagtcgaaattaaaacagaagcatcattagagtagttgctaatgattgtttttaaaatgtagtcacgcgctgcagggtctacaccaccaataggttcatcaaggatgtagagcctagctttacgactcataacaagtattaattgaactttttccttgttcccttttgataggttttttagacgttccctaggatttaggttaagatcctcaaatagttgatatgctacctttgaatcaaaatcgttatagaaatcttcaaataatgtaacgacgtctttgattttcatattttcttgtaaatatgaagtatcagggagatatgaaataatttttttggtttcaacagacggtctgtaaccatcaataacgatatctcccttatctggctgaagtaatccatttatcattttgatgattgttgtttttccgctaccatttggacctaataaacctataatctttcctgttggaatacttacagtcacatcattaacagcagtatgtttgtgatatttctttgtaacatgatgaagttgtaataactgtgtcatttaattaatctcctttataaaatgatcgagagcaaccgtaatttcatctaatttatatcctatttttttcatgttgttgacaaaagttgctaactctgcttttgcaacttgttgacgaattttaccaattagtaagttgtcttctgtaacaaagcgtccggaagtacgttgtgagaataccattccttcacgttccaattcagtgaaggcacgttgcatggtatttgggttaacaccagcttcttgagctaactctctcacggtaggcaattggtcaccactttttatttcttgactaacaatttgcatctttatatgttcagcaatttgtgaataaataggtgatttttcattgaattcccaagccatagataactcctttcataatcttgtactttttgtactataaaaatagtacaaaaaaatatttgaaatgtcaaggaattatcattgagactttaatcgtttattgtttcatagtataatagtaaaaaatcgtaaaaaggggctactatgtttgcacaacttgatacaagaaccgtttattcttttatggatagcttggttgatttaaagacatatgtctctaaatcgaaatcattaggatatcaaactattggtatcttggaccacagtaatctttatgcagcatatcattttattcaagaggcgcaaaaggcaaacctaagaccaatagttggatttagctttgatatagtggttgaaaatagatcaatagaagtttactgtattgcgataaatacagttggttataagaatctcttgaagttgtcaacggctcaaatgtctgagaagatgtctctaaatttattgacagaacatcttgaaggggtgcaattgattcttccctatcaagatgttcttgatcagctcaatttaccctttgattatgttattggtgttaatttgacctctccgcagattccatataccaaacccattatagccatagatactgttcgatattttcaaaaaaatgatattgagacattacagatgcttcatgctataagagataatgtcctgttaaaagacgcacaatatgcgagcaaaaatcaagaattaaaaccttgtcaagaaatgactctagcattcaaggaacgttttcctgaagctttagctaacctagaatctttggtagagaatgttgcttatcactttgattctgactttaagttacctatttttaatagagaaattcctgctggagaagaattaagaaccttaactcaaaataacttaaaaagtaaaggtttatggagcgatgcttatcaagagcgtctcgaaaaagaattaacaatcattcacaaaatgggctttgatgactatttccttattgtgtgggatttattaagatttggtcgtagtaagggctactatatgggaatgggacgtggttcagcagcgggaagtttagtctcatatgctttaaatattaccggtatcgatcctgtcaaacataatttaatttttgaacgttttttaaatgaagagcgttattcgatgccagatattgatattgatcttccggatatttatcgtggagaattcttgcgctatgtacgtaatcgatatggttcaatgcattctgcacagattgtaaccttctcaacttttggtgcgaaacaggctattcgagatgtttttaaacgctttggtgcatcagagtatgagttaacaaacataactaaaaaaattcatttcagagataatttgaccagtgtttataaccgcaacttagctttcagacaaataatagatagtaaaattgaataccaaaaagcctatgatattgctaagcgtattgaaggaaatcctagacagacttctattcatgccgctggggtagtaatgagtgacgatttgttaacagatcatattcctttaaaaaacggtgaggatatgatgataacgcaatatgatgctagttctgttgaggataatggtcttctaaaaatggactttctaggtcttcgaaatttgacatttgttcagaaaatgaaggagaaagtcgataaggactacggtatctctatacaattagaaactattgatttagaagataaagagactctaaaactatttgcagctggtcaaacaaaggggatttttcaatttgagcaaagtggagctattaatttgttgcgacgtattaggccagagtgttttgaagatgtggtagctaccaccagcttgaataggcctggtgcaagtgattatactgagaattttataaaccgtcgttttggtaaagaaaaaatcgatttagtagatcctgtcatagctccaattttacaacctacctatggcataatgctctatcaagaacaggttatgcagattgcccagacctacgcaggttttacgctaggcaagtctgatttgctcagacgtgctatgtctaagaaaaattctaaggagatgcaaaagatgtctcaatccttcttagagggtgcagtatctaagggacatcgtcaagaagatgctcgacttatatttgaacgcatggctaaatttgcaggttatgggtttaatcgcagccatgcgtttgcttattcggctttagcttttcaattagcctatttcaaagcccattattccgatgtcttttatgacatcatgataaattattcaaatagtgattatctaatcgatgctattgattttggttttgttattgaaaaaccttcaattaatactatttcatacagagaccgcatctataaaaagaaaatttatttaggtttaaaaaatattaagggtgttcctaacgatttggcttattggatttctaaaaatcaaccgtttcagagtattgaagattttctaatgaggctgccacagcagtttcaaaaaagtggttttatttctccgctaattgctattggagcatttgacgaatttgataataatagacggaaaatcacctctaatcttgattctttatttacatttgtaaatgaactaggtagtttatttgcagatacctcatatcattggctagaagtagaagatttctctaattctgagaaatatgaaatggaacaagatatcttaggagtaggaatcagcccgcaccctttagtggggatttcacaaaaagctagccgtccgtttataccaattagtcaagttcaagaaaatagcgaagctactattttagttcagctaaagcaggtcaaagttattaggacaaaaagttctgggcaacaaatggctttcttgactgttatggatattaattcaaaaatggatattactgtttttcctgaaactttcaatattgtaagagatgatttacaagaagggaaatattattacttgcatggaaaaattcagaagcgagatgagcgattacagatggttttaaacggtgttcaagaagcaacggaggaacgtttttggatacttctaaaaaatcatgataacgacaaaaaaatatcggaaatattgtccaaatacaaagggcatattcctgtctatttgcattatgaaacaactaaagaaactatccaaagcaaagtacatttggttagaaaagatagtggcttagcccttgatttatctgaatttgttgtgaaaacggtttatcaataaaattgcatataaagtgcagaaatttacaaattaatatgctataattaaatcgttaaattaataaaaggagtaccaattaaatgaaacgtattgctgttttaactagtggtggtgacgcccctggtatgaacgctgctatccgtgcagttgttcgtaaagcaatttctgaaggtatggaagtttacggcatcaaccaaggttactatggtatggtgacaggggatattttccctttggatgctaattctgttggggatactatcaaccgtggaggaacgtttttacgttcagcacgttatcctgaatttgctgaacttgaaggtcagcttaaagggattgaacagcttaaaaaacacggtattgaaggtgtagtagttatcggtggtgatggttcttatcatggtgctatgcgtctaactgagcacggtttcccagctgttggtttgccgggtacaattgataacgatatcgttggcactgactatactattggttttgacacagcagttgcgacagcagttgagaatcttgaccgtcttcgtgatacatcagcaagtcataaccgtacttttgttgttgaggttatgggaagaaatgcaggagatatcgctctttggtcaggtatcgctgcaggtgcagatcaaattattgttcctgaagaagagttcaatattgatgaagttgtctcaaatgttagagctggctatgcagctggtaaacatcaccaaatcatcgtccttgcagaaggtgttatgagtggtgatgagtttgcaaaaacaatgaaagcagcaggagacgatagcgatcttcgtgtgacgaatttaggacatctgctccgtggtggtagtccgacggctcgtgatcgtgtcttagcatctcgtatgggagcgtacgctgttcaattgttgaaagaaggtcgtggtggtttagccgttggtgtccacaacgaagaaatggttgaaagtccaattttaggtttagcagaagaaggtgctttgttcagcttgactgatgaaggaaaaatcgttgttaataatccgcataaagcggaccttcgcttggcagcacttaatcgtgaccttgccaaccaaagtagtaaataagaatttgtcaatttgacactttaaataaaaaggagctcataaattattatgaataaacgcgtaaaaatcgttgcaacacttggtcctgcggttgaattccgtggtggtaagaagtttggtgagtctggatactggggtgaaagccttgacgtagaagcttcagcagaaaaaattgctcaattgattaaagaaggtgctaacgttttccgtttcaacttctcacatggagatcatgctgagcaaggagctcgtatggctactgttcgtaaagcagaagagattgcaggacaaaaagttggcttcctccttgatactaaaggacctgaaattcgtacagaactttttgaagatggtgcagatttccattcatatacaacaggtacaaaattacgtgttgctactaagcaaggtatcaaatcaactccagaagtgattgcattgaatgttgctggtggacttgacatctttgatgacgttgaagttggtaagcaaatccttgttgatgatggtaaactaggtcttactgtgtttgcaaaagataaagacactcgtgaatttgaagtagttgttgagaatgatggccttattggtaaacaaaaaggtgtaaacatcccttatactaaaattcctttcccagcacttgcagaacgcgataatgctgatatccgttttggacttgagcaaggacttaactttattgctatctcatttgtacgtactgctaaagatgttaatgaagttcgtgctatttgtgaagaaactggcaatggacacgttaagttgtttgctaaaattgaaaatcaacaaggtatcgataatattgatgagattatcgaagcagcagatggtattatgattgctcgtggtgatatgggtatcgaagttccatttgaaatggttccagtttaccaaaaaatgatcattactaaagttaatgcagctggtaaagcagttattacagcaacaaatatgcttgaaacaatgactgataaaccacgtgcgactcgttcagaagtatctgatgtcttcaatgctgttattgatggtactgatgctacaatgctttcaggtgagtcagctaatggtaaatacccagttgagtcagttcgtacaatggctactattgataaaaatgctcaaacattactcaatgagtatggtcgcttagactcatctgcattcccacgtaataacaaaactgatgttattgcatctgcggttaaagatgcaacacactcaatggatatcaaacttgttgtaacaattactgaaacaggtaatacagctcgtgccatttctaaattccgtccagatgcagacattttggctgttacatttgatgaaaaagtacaacgttcattgatgattaactggggtgttatccctgtccttgcagacaaaccagcatctacagatgatatgtttgaggttgcagaacgtgtagcacttgaagcaggatttgttgaatcaggcgataatatcgttatcgttgcaggtgttcctgtaggtacaggtggaactaacacaatgcgtgttcgtactgttaaataatttttgaattcaaacctattatttaagaataccttaaataatgggttttttatatgttttgctttttattattcgattattgtgactagaataggatatgatattaataattaccctcctttttttatctatgaaaacatgatataatggaaaaaagattaggagtagttatggttaaacgcgattttattagaaatattattttagcattgattgctgtattgattttgattctcttgagatattttgtttttgcaacctttaaagtacataaggatgctacaaattcttattttagcaacggagatgttgttgttgttaatcgtaataggacgcctaagtacaaagactttattgtctataaggttggaaagattttctatattagtcgtgttattggtgagccaaatcaaaaagtgagagtaatggatgatattttatatttgaatgatgttttcaaggatgagccttacattgaaaaaatgaaaaatgcttattctgaaaagaaagacggtcaaatgccctttacttccgacttctcagttgaaacattaacacgaaataaagaaagcagagttcctaagggttcttatcttgtgttaaatgataatcgacaaaataaaaatgatagtcgaaaatttggattaatcaaagagaaagatattcgtggtgttattacctttaaagtataccctctaagtgaatttggttttacagcttcagagtagtaaaagaatggtattatttgataccattctttttatgtaataaaatggctaagaaatatatttttttaagatagatagaatttttgatagcgtttatctcgttatcacagaaaatcaaaaagactataccaatttttttattgacaaacaaaaacattaattatatactgtttttgttactttttaacggtatatattaatatataccaattcaaaaagaaagtttagatagaaagtataagagaaagctcttattggtaataataatatgtgtggtatcgtaggtgtagttggaaatacaaatgcaacggatattttaattcaaggcttagaaaagctagagtaccgaggatatgactcagcaggtatttttgtagtaggtgataacaaaagtcaacttgtgaagtcagtcggtcgaatcgcggagattcaggcaaaagtaggagattctgttagtggtacgacaggtatcggtcatacacgttgggcaacccatggtaaacctactgaaggaaatgcacatcctcacacttcaggatctggtcgttttgtattggtacacaatggtgttattgaaaattaccttcaaattaaagaaacttacttaacaaaacataacctcaagggtgaaactgatacagaaatagctattcatttagttgaacactttgttgaagaagataacttatcagtgcttgaagcctttaaaaaagccttacatattatagaaggatcatacgcatttgctcttattgattctcaagatgctgatacgatttacgtagctaaaaataaatcacctcttctaataggtttgggaaatggttataatatggtgtgttcagatgccatggctatgatacgtgagacaagtgaatatatggaaatccacgataaagaactcgttattgttaaaaaagatagcgttgaagttcaagattatgatggtaatgtcattgaacgtggtagctacacagcagagcttgacttatcagatattggtaaggggacttatccattctacatgcttaaagaaattgatgagcaaccaactgtgatgcgtaagttgatttcaacttatgcgaacgaatctggagatatgaatgtggattctgatattataaaatcagtccaagaagcagatcgtctttacatattggctgcaggaacgtcatatcatgctggttttgctgctaagaccatgatcgaaaaattaactgatacacctgttgaacttggagtttcttcagaatggggttacaacatgccacttttgagtaagaagccaatgtttattttacttagtcaatcgggagaaacagcagatagtagacaagttttagttaaagcaaacgaaatgggaatccctagtttaactataacaaatgtgcctggctcaacactttctcgtgaagcaacctatacgatgctcattcatgcaggacctgaaatcgctgttgcttctacaaaagcatatactgctcaagttgcaacgttagctttcttagcaaaagcggtaggagaagcaaatggtaaggcagaagcaaaagattttgatttggttcatgaattgtcaattgtagcacaatcaattgaagcgaccttatcagaaaaagatgttatctctgagaaggtagagcagttgttaatctcgacacgtaatgccttctacattggtcgtggtaacgactattatgttacaatggaggctgcactgaagctaaaagagatttcttatattcagacagaaggttttgctgcaggtgaattaaaacatggtacaatttcgttgattgaagacaatactcctgttattgctttaatatctgctgattcaactattgcagcgcatactcgtggaaatatccaagaagttgtttctcgcggagcaaatgctttgattattgtagaagaagggttggaacgtgaaggtgatgatattattgttaataaagttcacccattcttatcagccatttcaatggttattccgactcaattaattgcttactatgcttcattacaacgtggcttagatgttgataaaccacgtaatttggcaaaagctgtaactgttgaatagactcgttacactaaaatacgctaatattaactacaaaatattaaaaattgtaaaaaagcctatttttgaaggaaaataggccacgccaaacgcatgaagaaacttttgttttcagaaaactagattcataatgacaaaatcaatcaaagtagtacactatagatgaggtgactacgatgattgattttattatttctattgatgattgcgcagttgaattggatagtcgtcaatcttggaaaattcgctaccccttatcaaccattctatttcttgtctttgtttgtcagttagctggcattgaaacctggaaggagatggaagattttattgaaatgaatgaaccattgtttgcgacctacgttgatttgagtgaaggttgtccgtctcatgataccttagagcgtgtgattagtcttgttaattcagaccgtttaaaagagcttaaagttcaatttgagcaatcattgacaagcttagatgccgttcatcaactgatttcagtggacggtaaaacgattcgaggcaatcgaggtaaaaatcagaagcctgttcatattgtaacggcttatgatgggggtcatcatcttagtttgggacaggtagcggttgaggagaaaagtaatgaaattgttgccattcctcagttattgcggacaattgatatccgtaaaagcattgtaacgatagacgcaatgggcacgcagacggctatcgttgatacgattataaaaggtaaagcagactattgcttagccgtcaaaggaaatcaagaaacactttatgatgatattgctctttattttagtgatgtcaacttattggaagaactccaagaaaatgcgcagtattatcagactgttgaaaaatctaggggacagattgaagttagagaatactgggtgtcttccgatatcaaatggttgtgtcaaaatcatcccaaatggcataagttacgtggtattgggatgactcgtaacacgattgataaggatggtcagctgagtcaagagaatcgttattttatctttagctttaagccggatgtcctcacatttgccaattgtgtacgaggtcattggcagatagagagtatgcactggttattggacgttgtttatcatgaagatcatcatcagacattggataaaagagccgcatttaacctaaatcttatccgaaaaatgtgcttatattttctcaaagtgatggtatttcctaaaaaagacctcagttatcgtcgcaaacaacggtatatttctgtccatttggaagattatttagtccaattatttggagaaagaggctaagcagatcattgatttaaaaaggaatcttttcaaaattgatgtccgggcacaaaaggatgaagagaaagttttcatgcgtacggcgtggaaaataggctttttcctattgtcaagaagcctataatcagttagaatgttacttgctgactattttattaattaatttaaggagagaaaaatgtcattaccaaattgccctaagtgtaactctgaatatgtctatgaagacggtattttactggtttgtccagaatgtgcttacgagtggaatccagaagaaatcgaagaagaagtaggtttaattgtattggatagcaatggaacgcgcttatcagatggagatactgtgacagttattaaggatttaaaagtaaaaggagcgcctaaggatattaagcaaggcactcgtgttaaaaatattcgtttagttgatggcgatcataatatcgattgtaaaattgatggttttggagctatgaaactaaaatctgagtttgtaaaaaaatagctttcaggcaattggcaacggtcaattgctttttgaatatgacttgatttcatgcatttttattaaaaaagctctatgacattggtttgaattttgatataatgagaacatctattttttatttaggggggaccatgtcttatattttagaaatcttacctagcttattagtaggtgcgcaagtgacattgcaagttttctttattgttatttgtttatcaattccacttggtattgttgtagccttcctaatgaaagttcattttaagccgcttcaatggctactgacaacttatatttggattatgcgaggcacgcctctgttattacagcttatctttttttattactttttaccaagtgtagggatttcttttgatcgtatgccagctgcgattattgcttttacgatgaattatgcagcttattttgcagagatttttcgaggaggtattgagtctattcctaaagggcaatatgaagctgcaaaggtattaaagttttctaagtttcaaacggtttggtacatagtattacctcaagtcttcaaaatagtcttaccgagtgttttcaatgaaacgattactttagtgaaagattcctcattggtttacatacttggtgtgggcgacttacttctagaaagtaagacagccgcaaatagggatgcaacacttgcaccaatgtttatagcaggtggtatttacctattattaattggtcttttaactattttatctaaacaagttgaaaagcgttttaactactataaataaggagggacgatgttagaattaaaaaatatttctaaatgctatgggcaaaaagaaatctttaaagatttcaatctgactgtagaagaaggtaaaattctctctttagtaggaccttctggaggtggaaaaacaacactattacgtatgttagctggattggaaaagattgattcagggactattgttcacgatggtaaagaagtatctgttgatcatttggaaacactaaatcttttaggattcgtcttccaagactttcaattattcccacatttaacagtattagataatttgatcctctctcctgttaaaacgatgggattatcaaaagaacttgctaaagaaaaagccttagtattacttgaacgcttgggacttaaagaccatgctttagtctatccattttcattatctggggggcaaaagcaacgtgtcgcactagctcgtgcgatgatgattgatccacagattattggttatgatgagccaactagcgctcttgatccagagttgcgtcaagaagtagaaaaactaattttacaaaatagagaaacaggtatgacacaaattgtagtaacacatgatcttcaatttgctgaaagtatatctgatacgattctcaaaattaatcctaagtagacttgggggtagattgttgactcacaaaaatatattattaaccattatatttggattatttatgattatattatcagcatgtggtatgtctaataaggaaatggctggtattgataattgggaacattatcaaaaggaaaagaaaattactattggatttgataatacttttgttcctatgggatttgaaagtcgttctggtgactataccggctttgatattgatttagctaatgctgtttttaaagaatacggtatttcagtgaaatggcagcctattaactgggatatgaaagaaactgaacttaataatggtaatatagaccttatttggaatggttattcaaaaacggcagaacgtgctaaaaaagtcgcttttacaaacccatatatgaataatcatcaagtaattgttactaaaacttcatcacatattaatagtattaaggatatgaaggggaaaaaactaggagcccagtcgggttcatctggttttgatgcttttaacgctaaacctgatattttaaaaaagtttgtaaaaggaaaagaagcagttcaatacgatactttcactcaggctttgattgatttaaaaaataaccgtattgatggtcttttgattgatgaagtttatgctaactattatttaaagcaagaaggaaatataaaagcttattattttgttaaaactgcttatcaaggagaaaattttgtagtaggagctcgtaaagttgatcgtagactaattgaaaagattaacaaagctttcaaacagcttcataataaggggagatttcaaaaaatctcttacaaatggtttggtgaagatgtttatagtaaagaataaaagactaggaatttctcctagtcttttattctacgaaaaaattaaataaaaaacatcgatatatccgatgttttctaggttaattaaccaagtttagttgcaagacgtgctttatcgcggcttgctttgtttgtgtgaattaaacctttagaagcagctttgtcgatgcttgaagaagcagcgcggtaaagttcttctgaagggttagcttcaaatgctttaatagcagtacgcatagctgatttttgtgctgagtttttttcgttttgtttaacgttaagttcagcgcgtttgatagctgatttaatatttgccaatgttttcacctccatattaatctaactatataagtatatctaattaagtgatttttggcaaccctttatcactttttgagataaatttcatcaattttatgatgtttccctttatgaataataaaatcagccctatttctggttggttctatatatttttcaaggttgactaaattaatagttttccaaatatctttagctagttccatagctttatgtggcggtatttgtgtgaatttatgatagtaattactagggtctgcttcggctaattgtagaagactgttaaatcgttgtaaataccattcttcaatttgtttattttcagcatcaatgtatattgaaaaatcaaaataatcattcatgtaaagtcgatggttttgttggttttgaaagacatttattccttctaaaattaaaaaatctggtgtttcaatagtttgcaattgatttggaacgatatcgtagatttcatgagaataaattgggattttcgcggttataccgttctttatagtatctaagaaatttagaagtgactccatatcataggattccgggaaacctttacggtttaaaattccattttgtatgagtttctcgttaggatataaaaagccatcagtagtgactaattcgacgtgactatctttaaaagttcgtgaaattagtaattgtagtaagcgactggtagttgattttccaacagcaactgaccctgatatgccgataataaaaggacgttgataattttcctttttaagaaatattgctttagaaaaagataaattttcttgactacgtttatagatttgaataaggttaattaaaggaaggtagatgtcaataacatcttgaatattaatattatcgtttaagcttttgatagattcaagctctttttcagttagtaaagcttgggattgctgatgtaagtccttccaattttctctggaaatacggtcgaaattaataaattcattattcatgtcaaactcctatatgaaagctattataacattttattgagtgattgaaaaccgtttcaaaatatggtaaaataatatggcgaaattggagggttagaattatttatggctaatatgtattatacagagaatcctaatgttgaacatgatattcatgagctaaatgtcaaattattaggagaatcattcagttttttaactgatgcaggagttttctctaaaagaatgatagattatggtagtcaagtccttctaaatagtttacattttgaaaaaaataaatccttgttagaccttgggtgtggatacggtccgctgggaatttctctagccaaagtgcaaggagttaaagcaactatggttgacattaatacgagagcattggaattagctaagaaaaatgcaacacgcaatggagtagtagttgaagtctttcagtcaaacatttatgaaaatatttctaaaactttcgactatattataagcaacccacctattcgtgctggaaagcaagttgttcattctattatcgaagaaagtatctgttaccttaatacaggcggtagccttaccattgtcattcaaaagaaacaaggcgctccaagtgcaaaagctaaaatgctagatacttttggtaattgcgatattttaaaaaaagataagggatattatatattgagaagtgaaaaagtctaaatgatatccctaaagcgtaaaaataataaatagttcggataataactatcgtattattttttggaaaggttttctctaaaaatgttttctttaaattccgtataagataaaaagaattctgctttttattctgaaaattataaaaaactacttacattatctaaaaaaaatggtaaaatagattcagctaaaataccaagactaatgaaactacaagacttggttactcaataataaatacttctgtgtttgataagaagataataaacgtgttctaaaaattttgccagtaaacattatgaagcgaaaggtgcagctactaaaaatgggaaatatagagttgaaaaaattggctgtaaaagcgagtgaaaatgcatacgttccttactcgaaatttccagtaggcgcagcattgcgtacagcagaaggaaaaatatttacaggatgtaacgttgaaaatatcagttatggattagcaaactgtgctgagcgtactgcaatttttaaagctgtttcagaaggttataaagatttttcggaaattgctatttatggaaatactgaagaaccaatttctccttgcggtgcatgccgtcaagtgatggtggaattttttaataagaatgctaaagttacattgattgctaaaaatggtaagacggtcgagacgacggtcggtgagttgttaccatactcgtttgttgatttaaaataatttaaatcagttgctcttttaagcatttagcttaaatattaagttttttaggagggttcatttcatgaacaaaaaaattgccgggatcggcttggcttcgattgcagtacttagtttagctgcatgtggacatcgtggtgcttctaaatctggtggtaaatcagatagcttgaaggttgcaatggtaacagataccggtggtgttgatgataaatcatttaaccaatctggttgggaaggtatgcaagcttggggcaagaagaatggccttaaaaaaggagctggttttgactatttccaatcggcaagtgaatctgattatgcaactaacttagatacagctgtgtctagtggttataaattgattttcggtattggattttctcttcatgatgctattgataaagcagcagacaataacaaagatgttaattacgtcatcgttgatgatgttattaaagggaaagataatgttgcaagtgttgtctttgcggataatgaatcagcttacttagcaggtattgcagccgctaaaactaccaaaacaaaaacagttggctttgtaggtggtatggaatctgaggttattacccgttttgaaaaaggttttgaagcaggtgtcaaatcagttgataaatcaattaaaattaaagttgactatgctggttcattcggtgatgctgctaagggtaagacaattgcagccgcacaatatgcttctggcgcagatattgtttatcaagtagctggtggaactggtgcaggtgtattcagtgaagcaaaatcacgcaatgaatctttaaaagaagctgacaaagtttgggtattaggtgtagaccgtgaccaagcagcagaaggtaagtatacttctaaagatggtaaggcttctaactttgttttggcttcatcaattaaagaagttggaaaatcagttgaattgattgctactaaaacaagtaaaggtaaattcccaggtggtaatgtaacaacttatggtttgaaggatggtggagttgatatagcaactacaaacctttcagatgacgccgttaaagcgattaaagaggctaaagctaaaattatttcaggagatatcaaagttcctagcaaataatatctttaagaactttcaaaaaagcgattagaaatcgcttttttgaagctgagataaacttatatctcagtaaaatccatcagtcgttaacgattggtggattttactgaactataaatgaatttttctgaaagggagaaccacatgacacagaatgtcattgaaatgaaagaaatcactaagaaattcggtgattttgtggcaaatgatcatatcaatttgacggttgaaaaaggtgagatacatgctctgcttggcgaaaacggtgcagggaaatcaactttaatgaacatgttagcaggtttactagaaccaacagacggtcaaatttttattaatggtcagcctgtaactattgattcaccttccaaatcgtcacaattggggattggtatggtacatcagcatttcatgcttgttgaagcatttactgtagctgaaaatattgttctaggaaatgaaaccacccaaaatggtgttttagacattaagacagcagctaaagaaataaaggaactatcagagaaatatggtttgtcagtaaatccaaatgctaaaatatctgatatttctgtaggagcacagcagcgtgttgaaattttgaagacactttatcgcggtgcagatattttaatttttgatgagccgacggcggtgcttacaccatcagaaataaaagaattgatgacaattatgaagagccttgttaaagaaggcaaatccattatactaattacccataaattggatgaaattcgggcagttgctgataaagttactgtgattcgccgtggtaaaagtattgaaacagtccctgttgcaggcgcaagttctcaacaactggcggaaatgatggttggacgatctgtttccttcagaactgaaaaaaaggaagctaatccgactgacataatcctttctgtaaaggatttagttgtagaagaaaatagaggcggcgttctagctgttaaaaatctgtcgttagatgttcgagcaggtgaaattgtaggtatagctggtattgatggtaatggacaaagtgaattaattcaagctattacaggtttaagaaaggtaacttctggtcaaattgtaattaaaggtaaagatgtcacaaaattttcaagtcgacaaattacagaattaagtgtaggtcatgttccagaagatcgtcatagagatggtttggttctagatatgacgatggcagaaaatttagctttacaaacttattataaagagccattgagtcataaaggtatccttaattttgctaaaattaaagagtatgctcgtcaattaatgacagaatttgatgtgcgtggtgctggtgaacatgttttagcaagaggattttctggtggtaaccaacaaaaagcaattattgctcgtgaagtggatcgcgatccagacctactcattgttagccaaccgactcgtggtctagatgttggtgctatcgagtatattcataaacgtttgattgaagagcgcgataaagggaaagcggtcttagtagttagctttgagttagatgaaatcttaaacttatcagatcgtattgcagttattcatgatggtaaaattcaaggaattgttaaacccgaccaaaccaacaagcaagaattgggtattttgatggctggtggaaaaattgaaaaggaggagagagatgtctaagaaggcgcaaaaaattgcagttcctctgatttcagttgtactaggaatcattctaggagctattattatgctgatatttggttatgatccactttggggttatgagggattgttccaaacagcattcggtagtataaaaaatattggtgaaattttccgtgcaatgggaccattaattttaattgctctaggtttctcagttgccagtcgtgcaggtttctttaatattggacttccagggcaagccttatcaggatggattgccgcaggttggttcgctctttcacacccagatatgccacgtccagcaatgattctttgtactattattattggtatcgttgctgggggaatcactggagctattccaggtattctcagagcataccttggaacaagtgaagttattgtaactattatgatgaactatattgttctttattcaggaaatgctattgtacaacgtgttttcccaaaaagcattatgcgtacaagtgactcgagtgtatatgtttctgccaatgcatcataccagacagattggttatctagtttaacgaataattcacgtatcaatattggtatcttcattgctattattgcagttgtgttagtttggttcctattaaataaaacaacgcttggatttgaaattcgttcagttggtttaaatccaaatgctagtgagtacgctggtatgtctgcaaagcgtacaattattctatcaatgattatttctggagcttttgcaggacttggtggtgttgttgaaggactaggtacatttgagaatgtatttgtacagccatcctcgttagctattggctttgacggtatggcagtaagtctactcgcagcgaatagtccaataggtattttatttgcagcatttctatttggtgttctaagtgttggtgcgcctggtatgaacattgcaggtattccacctgagttaattaaagttgtaacagcttcaatcatcttcttcgtaggtgtccattacattattgagtatgttattaaacctaaaaaacaaatgaaaggtggtaagtaaattgagtttaacaacgatttttgcattgctattttcatcaatgctaatttacgcaacacctcttatctttacaagtattgggggaaccttctctgaacgtggtggtatcgtcaacgttggtttagaaggaattatggtaattggagctttctcaggcgttgtatttaatttagagtttgcttctgtttttggtgatgcgactccatggatttctgtactagttggtggtttagttggtttaattttttctgttatccatgcagttgcgacagttaattttcgtgcagatcatattatcagcggaaccgttcttaatttaatggcaccttcattagctgttttcttgattaaggttctttataataaaggtcaaactgataatattcaagaatcatttggaaaatttaatttccctatactatcagatattccttttgttggtgatatcttctttaaaggaacaagcttagtcggttatattgctattcttttctcattccttgcttggtttattctatataaaactcgctttggattaagattacgctcagttggagaacatcctcaagcagcagacaccttaggtattaatgtttatcttatgcgttactctggtgtcttgatttcaggtttccttggtggaataggaggagctgtatatgctcaatctatttctgttaactttgcagcgacaactatattaggaccgggctttatctccttagcggcgatgatttttggtaagtggaatccaattggtgcaatgcttgctagtctattctttggtttatcgcaaagtttagcagttatcggtagccatttaccacttttgagcaatattccaacagtttatctacaaattgctccatatgtcctcactatcattgtattagcagctttctttggacaagcagtagctcctaaggcggatggtattaattatattaaaacgaaataaataaaaagaaactagtataagctagtttctttttattgtttgtgaatttgtgaaaaaatactttgtgaaaatttcacataaattataatacaataacaataaaatataaaaaaatagaaaattgagtcattattctagtaagagtttgtgaataatgttataatgtgttttgttattaattatttataaaggagaactcttaatatgagtaaaatcgttgtcgtagggacaaaccacgctggtacagcagcaattaaaacaatgcttagtaattatggtgaagccaatgaaattgtaacatttgatcaaaattccaatatctctttcttaggatgtggtatggctctttggattggtgaacagattgatggtccagaaggattgttctactctgataaagagcagttggaaagtatgggagctaaggtttacatgaactctccagtacttaatattgactacgataaaaaagaagttacagctttagtagatggaaaagaacatgttgaaagttatgaaaaacttattttagcaactggttcacaacctatcattccaccaattaaaggtgttgaaattcaagaaggatctcgtgaatttaaagctactcttgaaaaccttcaatttgtgaaactttatcaaaattcagaagaagttattgaaaagttagctaaacctggtatcaatcgtgttgctgttgttggggctgggtatattggtgtagaattagcagaagctttccaacgtattggaaaagaagtaacacttgttgatgttgctgatacttgtatgggtggttactatgatcgtgactttactgatatgatgagtaaaaaccttgaagaccatggtattcgtcttgctttcggacaagctgttcaagcagttgaaggtgatggtaaagtagaacgtcttgttactgataaagaaacatttgatgttgatatggtgatcttagctgttggattccgtccaaatacagaactcggtgcaggtaaattagatacattccgtaatggcgcttgggtagttgataagaagcaagaaacaagcgtgaaagatgtttatgctataggtgattgtgcgacaatttgggataattctcgtgatgatatcaattatattgctcttgcttcaaacgccgttcgtactggtattgtagcagctcacaatgcatgtggtacagagcttgaaggtgctggtgtccaagggtcaaatggtatctcaatctatggccttaacatggtgtcaactggtttgactttagaaaaagcaaaacaagctgggtacaatgcagttgaaacaggctttaatgaccttcaaaaaccagaatttatcaaacacaataatcatgaagtagctattaagattgtctatgataaagatagccgagttatccttggttgccaaatggtctcacacgaagatgtatctatgggaattcatatgttctcacttgctattcaagaaaaagttactattgaaaagcttgctttgaccgatatcttcttcttaccacattttaataagccatataactatattacaatggctgcattaggcgctaaagattaatttaaaattaaaaaggttaagcgaaatgcttagccttttatttcatcctttaacaaggtcaaaaatgtaacggcaaagaaaaagctaagatattcctatcctagctttttttcaactatgttagttttttgatgcttcttggaattctgggtttttccaagcttcgtcaataatatcttttaattgttcagctgaggcttgcattttttgaagttcagcatcatttaatgggatattaactggacgaacgataccatgtgcacctacgattgcaggctgaccgataaagacatctttaacatcaccgtattggccttcttgatatacagataatggaagaactgcattttcatcatcaaggatagctttagtaatacgagcaagtgcgacagcaataccgtaatatgtagcaccttttttgttgatgattgagtatgcagcgtcacgaactgaaataaacaaatcaacaagtccttgttcatcaatatcgcgattttcttgtaaccattgttcaagttggacaccagcaacgttagcatgtgaccaaacggcaaattctgagtcaccgtgttcacccatgatgtatgcgtgaactgaacgagcatcaacaccaattttatctgctaaagcttgacggaaacgtgcagagtcaagtgaagtacctgaaccaataacgcgttccttagggaaacctgagaatttccaagttgaatatgtaagtacatctacagggttagccgctactaagaagataccgttgaaacctgattcaacaacttgagttacgattgatttgttaattgctaagtttttaccaacaaggtcaagtcgagtttcacctggtttttgaggtgcgccagcagtaatgacaacaaggtcagcatctgcgcagtctgcataagtagctgcgtagatttttttaggtgatgtaaatgcaagggcatgtgaaagatcttcagcatcaccaacagctttatcaaataaagctgggatttcaatgatacctaactcttgcgcaataccttggttaacaagtgcaaaagcgtaagaagaacctacggcaccatcaccaacgagaataacttttttatgttgtttagttgcagtcatttctaaacatctccttaaatatttttgggaagtttcccatacacctatattctatcattttcaatgaaagaagtcactaataaaatgtgaaaaaatttgcaaacaaattgaaatatcatagaaaactattgaaaacgctgagtgtcttgatatttttgataccgatttatcatcgcaattttacctaaattatggtacaatgtaagagacttacagtgaagaaaaggggcattttttaatgcaagataaaaatttagtagatgttaatctaactagtgaaatgaaaacgagttttatcgattacgccatgagtgtcattgttgctcgtgcacttccagatgttagagatggtttaaaacctgttcatcgtcgtattttatatggtatgaatgaactaggtgtgacacctgataaacctcataagaaatcagcacgtattactggtgatgttatgggtaaataccatccacatggtgattcatctatttacgaagcaatggtgcgtatggcacaatggtggtcatatcgtcatatgctcgttgatggtcatggaaactttggttcaatggatggggatggtgctgccgcacagcgttatacagaagcacgtatgagtaaaattgctcttgagatgcttcgtgatatcaataaaaatacagttgattttcaagataactatgatggcagtgaacgtgaacctcttgttttaccagcgcgtttccctaatttattagtcaatggtgcaactggtattgctgtaggtatggcaacaaatattccaccacataatctaggtgagtctatagatgctgtcaaattggttatggataaccctgatgttactacacgggagttaatggaagttattcctggtccagattttcctactggtgccttggtgatgggacgttcaggtattcaccgtgcctatgaaactgggaagggatcaattgtcttacgttcacggactgaaattgaaacaacttcaaatgggaaagagcgtattgttgtcacagagtttccatatggcgttaataaaacaaaagtacacgagcatattgtacgtttagcacaagaaaagcgcattgaaggtattactgctgttcgtgatgaatcaagtcgtgaaggcgttcgttttgttattgaagttcgtcgtgctgcttcagcaaatgtgattttaaataatcttttcaaattaactagcttgcagacaaattttagcttcaatatgcttgctattgaaaaaggtgttccaaaaattttgtcattacgacaaatcattgataactatattgaacaccaaaaggaagttattgttcgtcgtactcagtttgacaaagctaaagcaggagcccgtgctcatatcttagaaggtttacttgtggcgcttgatcacttggatgaagttatcacaattattcgtaatagtgagacagacaccattgctcaagcagagttgatgtcacgttttgaattatcggagcgtcagagtcaagctattttagatatgcgtcttcgtcgtttaactggattagaacgcgataaaatccaatcagaatacaatgacttactagctttaattgctgatttagcagatatcttagctaagcctgaacgtgttgttaccattataaaagaagagatggatgaggttaagcgtaagtatgctgatgcccgtcgtacagaattaatgattggtgaagttttatcacttgaagatgaagaccttattgaggaagaagatgttcttattactctctcaaacaagggatatatcaagcgtctcgctcaagatgagtttagagcacaaaaacgtggaggacgcggtattcaagggactggagttaataacgatgattttgttcgtgaattggtttcaacaagtactcacgatactgtgcttttctttacaaatttagggcgtgtgtatcgtttgaaagcatatgaaattccagaatatggacgtacagctaaaggcctccctatcgttaaccttttaaaacttgacgaaggtgagacaattcaaacaattattaacgctagaaaagaagatgtcgctaataaatatttctttttcacaactcagcaaggtatagtgaaacgtacaagtgtttctgaatttagtaacattcgtcaaaatggacttcgtgctattaatttgaaagagaatgacgagttgattaacgtcctcttgattgacgaaaatgaagatgttattatcgggacacgtacaggctactctgttcgcttcaaagtgaacgctgtacgtaatatgggacgcacagcgactggggtacgaggcgttaatcttcgtgaaggtgataaagttgtgggagcttctcgtatcgttaatggacaagaagtactaatcatcactgaaaaaggttatggcaagagaacagaagcttcggaatatcctacaaaaggccgtggtggtaaaggaataaaaaccgctaatattactgctaaaaatgggccattagcacgcttagtgacgattaatggaaatgaggacatcatggtcattacagatacaggtgttattattcgaaccaatgttgctaatatttctcaaactggtcgttctaccatgggtgttaaagtgatgagacttgatcaagaagctaaaatcgtcactgttgcgctagtggaacaagaaattgaagataagtctaatatagaggatacaaaagaataggaagttatgcgtaataaaaaaaaatcacatggtttctttaactttgttagatggttattggttgtattgctaattattgttgggttggctttggtgttcaataaaccaattcgcaatgctttcatagctcatcaatcaaatcattatcaaatttcacgagttagtaaaaaaacaattgaaaaaaataagaaatctaaaacaagttatgacttttcatcagtcaaatctattagtacagaatcgattttatctgctcaaacgaaatcacataatttgcctgtaataggagggattgctataccagatgtcgaaatcaatctcccaattttcaaaggactgggcaatacagagttgagttatggtgcaggaacgatgaaagaaaaccagattatgggaggcccaaataactatgccttagctagtcaccatgtctttggtttgacaggttcttctaagatgctcttttcacctttagaacatgctaagaaaggtatgaaagtttacctcactgataaaagcaaagtatacacttacactattactgaaatttcaaaggtaacaccagaacatgttgaggttattgatgatacacctggcaagagccaactcactttagtgacctgtacggatccagaagccacagaacgtattattgtgcatgctgaattagaaaaaacaggtgaattttcaacagcagatgagtcgatattaaaagcattttcgaaaaaatataatcaaattaatctctagaaggtagttagaattatgaaattaaaggctgttcatcatattgcgataattgtttctgactatgaaaagtcaaaagacttctatgttaataagctaggatttgaaattattcgtgaaaaccatcgtccggagcgtcatgattataaattagatttacggtgcggtgatattgagcttgaaatatttggaaatcgtcttgatgatccagaatatgaaactcctcctcagagaataggtaggccgaattggccacgtgaagcatgtggtttacgacaccttgccttttacgttccagatgtggaagcgtacaaggtagaactggagaatttaggaatttttgtagagcctattcgttacgatgactatactggcaaaaagatgacctttttctttgatccagatggtttacctttagaattacatgaataataaacaaagttgcgtggatacgcaactttgtttaatttactgaataattttatattcaagaagttttttaaagaaataagtaagttaatcatggtataatgtaaggtatgaaaagaattgaaaaggaattattttgaaatgaggatactaaaatgagtattaaaaagctattgtttgcaggccttgcttttattttatttaccctagcgagtccagcatatgctgcatcagatgttcagaaagttattgatgaaacttatgttcaacctgattatgtcttaggttattcgctaaatcaagaacagcgtgcacagacattacaacttctgaattatgatgaatctagagacacgaaagttaaaacgctaaatactagctcatatgctaaaataatgaatatagctgatgatgcaagcatccaattatattcatctgttaaaataaaaaaattagggtctaacgataccttagcagtaaacattgttacacctgagaatattactaaagttacagaagatatgtatcgcaatgctgcagttacattaggtattgagcatgcaacgatatcagtggctgctccaataaaagtaactggggagagtgctcttgcaggtatctattattcattagagaaaaatggagcaagtgtatcatcagaaaataaacaactagcacaagaagagttaagtactttatctggtattaatgctgagaataagggtaaggaaggttatgacgccgacaagcttaatgtagctttaacggatattaagtcagccgtagctaaaggaggatctgatctttcaaaagatgatattcgaaaaattgttgaggaaacattgaaaaattatcatcttgataacgctgtaacggaaaatcaaataaatttaattgttaattttgcagttaatctttcacaaagtaatgtcatcaaaaatagtgatttcacgaacaccttgaataatttgaaagacaacattgtttcgaaagcaggatctaaatttaaaaatatcaatgtcaattttaatgctaataaagctgttgaatcaggtaagggatttttagctaatatttggcaacaaattgttaattttttccagcagtttggtagttaataaaaaagtctagcttataagctagactttttttaccctaaataaatgtttgtgtttttttactaatctttaaatgaatatttaagaataaatggcgcaataatagttgatagtataacaacaataacaagctcggaataagtagtgcttgaaataattttagcagctaatccaacttgaactataatgagagccatctcgccacgactgaccattccaccaccaattgttaaagattctaattttgaaaaattaaagcctcgaccgacaaagtaccctggaattaattttgataaaacagccaaagcagtaaagattaatatcgtgtgaaggtgagacatcattccatcgaatttaagaggtagtgcaattgaagcgaagaaaattgggataaagaaggtgtaactaagaagtgaaattttatgttctaccttatcaacaaaagaagtttgtccaatagctaatcctgcaaaaaacgaaccaatgatagaactcattccaactttatcggctaaaattgatagagaaaaacagataaggatagcaagaatagtatatttctcaaagaaatgaaccttttcgattaatttgaaaagagcaggtacaaggtatttcatacaaataaataagaaaacaaagaataacaattgaatgataatttgtaatccgatattagaagagcttccatttgttgcaataaagacactcagaagcaaaacagctaagacatcatcagcaacagcagcacctaaaataatagcaccagtatctgtttttacacgattgtattcttgtaaaacttcaactgtgatagaaatactagttgcagcaaatacgagcccgtaaaagatagcagtattgatttggaacccaaacaagcgtgtcaagaagtagaagagagccataggaacaataacaccagtaattgcgaccagtagactgggcttaagatacttctttaaaagatcaaaattagcttcaagacccgctaaaaacatgagtaagataacaccaatttctgacaagacatgtaatacctgattttgatgaacaagtcctagcattgcaggtccgatgatgatacctacaagtagttgtccaacaacagccggtattccaattctttttgaaataagagttgcaagaacgcttgccaacaaaatgattgtaatttgaatgataatatgcattttttcctcctaatattaataaaatgatatcaatcatattgtactgaatatttagaataccattttttaagcctaaaatctaggaatatttcttttctgtctttttcatattattatcaagaaaatggaaaaatatactgaaaaatattcaatttaagaataatgaacttgtaactatcgaactacataaaaatgatattttaagtgtaagtatctcttattagacttcctgcgaaacaaaatatggtacaatagttctatgaattatgaagcaagcaaacaattaactgatgtacgatttaagcgccttgttggtgttcagcgcactacttttgaagagatgttagctgtgttaaaaacagcttatcaacgtaaacacgcaaaaggtggccgaacccctaagttaagcttagaagatctcctcatggctactcttcaatacatgcgagaataccgcacttatgaacaaattgcggctgattttggcattcacgaaagcaacttaatccgtcgaagtcaatgggttgaatcaactcttattcaaagtggttttacgatttcaaaaactcatcttagtgctgaggatacggtgattgtggatgcaacagaggtaaaaatcaatcgtcctaaaaaaatcaactagcgaattattctggtaaaaagaaatgtcatgctatgaaggctcaggcgattgtcacaagccaagggagaattgtttctttggatattgcagtgaactattgccacgatatgaagttgttcaaaatgagtcgcagaaacatcggacaagctgctaaaatcttggcagacagtggttatcaagggatcatgaagatgtattcacaagcgcaaactccgaggaaatcaagcaaacttaagccactaactcttgaagataaaacctataaccatacgctatccaaagagagaatcaaggttgagaatatttttgccaaagtaaaaacgtttaaaatattttcaacaacctatcgaaatcgacgcaaacggtttggattacgaatgaatttgattgctggaatgatcaaccgtgaactaggattttagtttcgcaggaagtctattcaagaaataagagtaaaaaaacttagctacttaaagtagctaagtttttattcccactcaacagttgcaggtggtttacttgtaatatcataaacaatacggttaacgtgatcaacttcgttaacaatacgtgtcgaaattttcttaagtacatcccaaggaagttgcgcaaagtcagctgtcatgccatcaattgaagtaattgcacggatagcaattgtatagtcataagtacgaccatctcccataacaccgacagaacgtacgccagtattaactgtgaaatactgccatacgtcacgatctagaccagctttagcgatttcttcacgaagaatagcatctgattcgcggactgtttcaagtttttcttcggtaatttcacccataacgcgaatagcaagaccaggcccagggaatggttgacgccatacaacttcatcaggcattccaagtgcagtaccaagagcgcgaacctcatctttgaataatgtgttaagtggctcaatcaattcaaattgcatatcttctggcaatccaccaacattatggtgtgacttgattgtttgggctgtttctgtcccagattcaataatatctgtgtagagggtaccttgagcaaggaaatcaacgcctttaagtttacttgcctcatcatcaaaaacgtacacgaactcatttccgatgatttttcgttttctctcgggatcttcaacaccagaaagaagatctaggaagcgttttgaagcatcaacacggataatattaagtccaaatttaccaccaagcatatccataacttggtcaccttcatttttacgtaataaaccatgatctacaaaaatacatgttaattgatcaccgatagcacgttgtaggagtactccgacaacagatgaatcaacaccgccagatagtccaagaagtactttacgatcgcctacagtttcacgtatttttgcaatttccatatcaatgaagttatccattgaccaatcaccacgtgcgccacagatattaacagcaaaatttttaaggatatcattgccatatactgagtgacgaacttcggggtggaattggataccataaaattgtttttcagtattttccattgcagcaaatggacagtcaacagagtcaccaacgagatggaaaccctcaggaatttcagtgacagcatcaccatggctcatcaaaacaagttgttcttgaggagtgccagcaaagagtgctgattctgagcgtaggcgaagtgctgattgaccatactcacgatgaccagcttctcccgcaggaagaaccttaccaccgagtttatgggtaatcagttgcatgccataacaaattcctaagattggaattcctaattcaaaaatttcttcatcgattccaaaagcgccatcagcgtatacggaatttggaccacctgaaagtacgataccaataggattaatatcgcgaatttcatcagccgtaattttatgtgattttaactcagaaaatacaccaaattcacggatacgacgtgcgataagctggttatattgactaccgtaatctagaacgataattttttggatatcattcaatatagaaatatcagtcattgtttccctttctttgtagctaattttaaaaacagctgtacctataccattttagcatattttatataaattaacatcattaaaataattgattaaacgctttcttatcaagaaatattgcttatgatttttctgaattatttcacgattttagagttagaaatatatagaagtatggtaaaatgaagtgtagattctaggaggagagaatattgttaccagcatatattaaaattcacgacgctattaaaaaggaaatcgataaagggacttggaagattgggcagcggttacctagcgaaagagatttagcggatgattatagtgtaagtcgtatgacacttcgccaatcaattacattgttagttgaagaaggtattttggagagacgagttggtagtggcacctatgttgctagtcatcgtgttcaagaaaaaatgcggggaacaactagttttacagaaattgtcaattctcaagggcgtaagccatccagtaaactaatctcatttcaaagaaaactagcaaatgaaaccgaaattcaaaaattaaatttatcacagtcagattatgtggttcgtatggaaagggtacgttatgctgataaggtaccgttggtttatgaggtagcctctataccagagaatttaattaaaggttttgaacaatcagaggttacagaacatttctttaaaaccttaacagagaatggctacgaaattgggaaaagccaacaaactatatatgctagaaatgctagtgaacgtgttgcttcgcatttagaagttaacgcaggccatgctattttggcattgacacaagtttcatactttactgatggtaagccttttgaatatgttcatgggcaatatgttggagatcgttttgagttttatttagagaataactagtagtttaatgaataacgttttttgaagaagtagctatgtatgttataatggaaaaataaattatatagaaagatttgaggaagtagttgactactttcaagaggtattagttcatgtctcaatcttacattaatgttatcggcgctggtttggctggttctgaagcagcttatcaaattgctaaacgtggaataccagttaagctttatgaaatgcgtggggttaaatcaacccctcaacataaaacagataattttgcagaattagtatgttccaattcattccgcggtgattctctaacaaatgcagttggtcttttaaaagaagaaatgcgtcgtttggattctatcattatgagaaatggggaggcacatcgagttccagcaggtggagccatggccgttgatagagaaggttattctgaagctgttactgaggaaatccataaacatccattaatcgaagtaattcgtgatgaaatcacagatatccctggagatgctattacagttatcgctacaggaccattaacaagtgatagtctggcagctaaaatccatgaacttaatggtggtgatggtttttatttttacgatgccgccgctccaattgtcgataaaaatacgattgacataaataaagtttaccttaagtctaggtatgacaaaggtgaagcagcttatctaaattgtccaatgaccaaagaagaatttatggcttttcatgaagctttaactacagctgaggaagcaccactaaattcttttgagaaagaaaaatacttcgaaggttgtatgcctatcgaagtgatggctaagcgtggtattaaaacgatgctttatggtccaatgaaaccagttggtttggagtatcctgaggactacaaaggaccgcgagatggtgaatttaaaacaccatatgctgttgttcaattacgtcaagataatgctgcaggctctctttataacatagttggtttccaaactcatcttaagtggggagaacaaaaacgtgtatttcaaatgattcctggtcttgaaaatgctgaatttgtccggtatggtgttatgcatcgcaattcttatatggattcaccaaatcttttaaaccaaacctttgctacacgtaagaacccaaatcttttctttgctggacaaatgaccggtgttgaaggttatgtagaatcggcagcaagtggtcttgtagcgggaatcaatgctgtccgtcgcttcaatggggagagtgaagtagttttcccacaaactactgctattggtgcactgccacattatattacacatacagacagcaaacatttccaaccaatgaatgttaactttggtatcatcaaagaattagaaggtccacgaattcgtgataagaaagagcgttatgaagctattgctacacgagctttgaaagatttagaaaaatttctcaactattgatatattcatttgactttgccaacaagcaaggtcaaattttctatattgatttttaaaaatgtatgaatggagtaaatatgcactataaagaattacttgagtcatccgaaaaagcttatttggaaactaatcggtataaacattttaagaatataatcatttcagagcgttatttttcaaactatattagctacaaaataatgcctacagtaagtgagtttttacaggatatgatctatttagcagatgaacaaaaagattatcagtctgattttgcttttgtattttttgaggaaaatgctgaattgagcagtgaattacagagaactttatcacaacaaggctttgaatcagagaaacatatcatatttacaaattcattaaatcatcttaaactttttgaaaaagaatttgatgacatcacatttactaaacttaatgaaaattacctagaaaaatacctaaagttcaaatataaacaaagtatagtttacggagaaatttacgctaagcaaatgtataatgataatcgtgttaatcttttaaataataatgctaaagtttacctagctattaaagataatcaaattattggagatgtaacagcttgggactatggtgaatacgtggaaatagatgatttttatgtccaagagtcctacagaggacaaggaattggtacgcgcctacaatttgatgcaagtagggggtttaagaaagttatcttaatttcagaagaagaaaacagaaaaatgtatgagcaccaaggttatgaggaagtcgcctattattggaccgctttacggagccctcgaaagtaaaattataaaagaaatgatatagttaaaagctatatctcttgattgataataagtattttttaatccattagctttttgttacactagtatcagttgattaatcatacaaccatatcaaaggagaaataaattatgaaaatcaaaaagctattagggttaacgacaacagtagtaatttcagcacttattttaggagcctgtggtcagtctaaaaatgaagacgccaaagtcgttagagttggaacaatggtaaagagtaaaactgaaaaagctcgttgggataaaatcgaagaattagttaagaaaaaaggcgttaagctaaaatttacggaattcacagattatacacaacctaataaagctttagaaagtgatgagattgatattaatgctttccagcattataattacttaaacaattggaataaagcaaataagaccaatcttgtttccgttgctgagacatactttacttcctttagattatactctggtactaagaacggtaaaggtaaataccaaacagtttctgaaattccaaataaagcaactattactatcccaaacgatgcagttaacgaaagtcgctctctctacttgttacaatcagcaggcttgctaaaattgaaagtatcaggtgatgcattagcaacaatgtcagatgttgtttccaatcctaaatctttagatttaaaagaagtagatgcagcacagaccgcacgttctttggattccacagatgcagcagttattaataatgattttgtgacagaagcaggaataaatcctaaatcagctatttttattgaaccaaaaagtaaaaatgcaaaacaatggtacaaccttttagttgctcaaaaaggttggcaagacaaatcaaaagctaaagccattaaagaagttgtgaaagcttaccatacagatgcggttaaaaaagttatcgaaaaaacatctcaaggtttagatcaacctgtttggtaaaaataaataagcatggtcaattcgatcatgcttatttatttcgattttttttgagtaattgactaggggtactcaatacttctgttaaccgttgttgtcgtgctttacttttttcggatttagataaaagtagtgtcttactttcttcaaggatatcctctgtaatatagtacaacttcactaatgaaccgattctgaccctaccagctttaggcgacatattcacaacttgattaggatgtagggttgcccactttgaatttggttcagcaacaatccttgatacattaaaatggcgttgctctaagtaaacttgcgcatcattgatatcaaggtgtactacattatcaagctgagtataagtctgtttttttttcatgacgacggtcaagttctttttcaataattggacgagaattatcaattgcttttccaataagttcagttgtgtcagggattattgaaattaatttaccaataggccctaaagattttgtcaattttttacttgtcttggccatatgttttcaccgtactttccatttgttatgtaagatattatatcaaaattatagtttataaagcttttaaaactttcaaatttgtaagaaataggtcttaagatgtaaggttatagtaaaccattttgccatataatagacttaaagagaaagggggagcaagagatgcggcgaaaaatagttttactttttgtagttccaatgcttatagttttaggaattttaggagtggtagttcattattatggttcagcattaaatatttatctattacctcctagtagcgaacgttatggacgtgttattttagatcgtgttgaacagcgtggtttgtattcgcaaggtcgtcaatggcaaattataagacaacgatcagaaaaaaagttgaaaacgtcaaaatcttaccaagagagtcgcaacattgtacaggaagcagtacggtatggaggcggtaaacatagtcaaatattatccaaagagactgtacgaagagataccctagatagtcgatatccagaatatcgaagattaaacgaagacattctcttaattactattccttctataagtaagttagataaacgatctattagccattatagtggtaaattacaaaatatattgatggaaaaaagttataagggactcattttagacttatcgaataatactggcggcaatatgatccctatgattgggggggtagcctctattttaccaaatgataccctatttcattatactgataagtatggaaataagaaaacaatcacgatgaaaaatataccgctagaagcattaaaaatatctaggaaaacaatcaatactaagcatgttccaatcgctattataactaatcataaaactgctagttcggcagaaatgacttttttatcatttaaaggattacctaatgttaaaagctttggtcaagctacagcaggatatacgactgttaatgaaactttcatgctttacgacggtgctagattagctttaactacaggaatagttagtgatcgacaaggatataaatacgagaacacccctatcttaccagatcaagtaaccagccttcctttacaagagtcacagtcttggttaaagagtagaatcaatcaaaattagggtataataaataaaggagaattatatgttattagaaatcaatcacttagaaaaagtttttcgtacacgtttttcaaaagaagagacaagggctctacaagacgtcgattttaaagttgaacaaggggaattcattgctattatgggagagtctggttcgggaaaaacaactctgctaaatattttagctactttagaaaaaccgacaaatggacaagtgattttaaatggggaagatattacgaaaattaaagaggcaaaattagcgagttttcgtttgaaaaatcttggtttcgtctttcaggacttcaaccttttggatactctctctgtaagagataatatctatcttcctttagttcttgatcgtaaacgttacaaagaaatggatcatcgtttgtcagaattatcttctcatctgagaattgatgacttattagataagagacctttcgagctctctggtgggcaaaagcaacgtgtagcgattgctcgtagtttgataaccaaccctcaaattttattagcagatgaaccaacagcagcgttagattaccgtaattcagaagacttgctgaatttatttgaaactattaacttggatggacaaactattttgatggtaacccattcagcaaatgctgctagtcatgccaaacgcgttttatttatcaaagatggacgtatttttcaccaactttatcgtggtaataagaataatagcgaattcaataaagatatttctttaacaatgtctgccatattagggggtgaataatatgttttatctcaaaatagcctggcataatttaaaacattctatagaccagtacataccattcctcttagccagtttattactttattcattgacttgttctacgctactaatcttaatgagtgctgttggaagagatatggggacagcggcaacggttctttttcttggagtgattgttttgtcaatctttgcggtagtcatggaacattatagctacaatatcttgatgaaacagcgtagtagtgaatttggactgtataacattttggggatgaataaacgtcaagttgcgcgtgtagctagtctagagctgtttattatttatatatttcttatttctataggaagtctgtttagtgctttttttgctaaatttatttatttaatttttgtcaacattattaactatcatgcactaaatcttagtttaagtttatggccatttattatttgtatcgttatatttacaggtatttttctgactttagaagttccagttattcgacatgttcatttatcatccccattaagtctttttagaaagaaacaacagggagaaaaagaaccaaaaggtaatcttatacttgcaattttagcgttagtagctatcgccatcgcttatacaatggctcttacttcaggtaaagcacctgcattagctgttatctatcgtttcttctttgcagtacttttagttattgctggtacttatcttttttatattagttttatgacatggtacttaaaaaggttgcgtcaaaacaagcattattattataaatctgagcattttgtatcaacttcgcaaatgatttttcgaatgaagcaaaatgcagtagggttagcaagtatcactttattagctgttatggctctagttactattgctacaacagtctcactttattcaaatacacaaaatgttgttaccggactatttccaaaatcagtaagtttatcaatagataattcaaaaggtgacgcgaaaaatatatttgaagaaaagattttgaagaaactaggtaagtcatctaaggaagctatcacttataatcagacaatgatttcgatgccagttagtcaatcaagtgaacttaatatcacatctaaaaacgtcaaacatgttgatatcacaaaaacgggttttatgtacctaattactcagaatgatttccgtcgtttaggtcaccaattaccaaaattaaaagataaccaagtggcttactttgttcaaaaaggtgatagccgtttgaaaaaaataaatctattgggaaataaatttgacgttgtaaaaaatttaaaagaggcttatgtcccagagactacaaatacttacaacccgggtttgattatatttgcaaacaacaaacaaattgacaatattagaaaagcatatttaccttatactaagaacatcaatacttttccaaaaacctttaaggcatatttggatttgaatagtcaagagataaattcaatttctaaaaacgacataatagaggtagatggtaagtatgttggaaatattagcactaaacagagttttctaaaagaaggttatcaaatgtttggtgggttattatttactggatttctgttaggtataagctttttgctaggtatagctctaattgtttactataagcaatactcagaaggtcatgaagataagagatcttatcgtatcttacaagaagtaggtatgagcaaaaaattagttaaacggactattaattctcaaattatgattttcttcttccaacctttagtggtagcagttattcactttggagttgctattccaatgctaaaacagatgcttttggtatttggggtgcttaactcaacaatcgtatatgtagtaagtggtttgacagtacttgcgatttctataatttactttatcatttaccgtataactagtcgaacttattatcatattattgaacgctaaaaaggattggttattttaccaatccttttgcattaatagaaaccgatagactaaaaaatttgttatactaaatgaaagaaagagatttcgtactattttaggaggggatatgtcacaagagcaaggaaaaatttatattgtagaagatgatatgacgattgtgtcacttttaaaagatcatttatcagctagctatcatgtctctagtgtcagcaattttcgtgatgtgaaacaagaaattatcgcatttcaacccgatttgatactaatggatattacgttaccctattttaatggtttttactggactgcagaattgcgtaagtttttaacaattcctattattttcatttcatctagtaatgatgaaatggatatggttatggcattaaatatggggggtgatgactttatttcaaaaccattctctctagctgtattagatgctaagctaactgctattttaaggagaagtcaacaatttatccaacaggaattaacttttgggggatttacgttgacaagagaagggttattgtctagccaagataaagaggttattttatcgccaacagaaaataaaatcctatctatcttgctcatgcatcctaaacaagtagtctcaaaagagtctctattagagaaactttgggaaaatgatagttttattgatcaaaatacacttaatgttaatatgacacgcttacgtaaaaaaattgtcccaataggttttgattacattcatacagtgagaggagttgggtatttactacaatgatacgccagtttttaagagaacacttgatttggtatattttatatatcatgatgtttgtcctattttttattagtttctatctatatcatttaccaatgccctatttgtttaattccttaggtttaaatgttattgttttactaggaattagtatttggcaatacagtcgttacaggaaaaaaatgttacatctcaaatattttaatagtagtcaggacccctctttcgaacttcaaccgagtgattacgcttattttaatattattacacaattagaagctagagaagcgcaaaaagtttctgaaacaattgaacaaaccaatcatgttgcacttatgataaagatgtggtcgcaccaaatgaaagttccattggcagctatttcattaatggcccagacaaatcatctcgatcctaaggaagttgaacaacaattattgaaattgcaacattatcttgaaacgttgttagcatttttgaaatttagacaatatcgtgacgattttcgttttgaagctgttagccttagagaagtagtagtagaaattataaaatcgtataaggttatttgtctatccaaaagcttatctatcataattgaaggcgataatatctggaaaacagacaaaaagtggttaacttttgctctttcacaggtgctagataatgccataaaatattctaatcctgagtcaaagataataataagcataggagaagagagtattagaatacaagactacggtatcggcatactcgaagaagatatccctagactttttgaagatggctttacgggttacaacggtcatgagcaccaaaaggcaacaggcatggggttatatatgacaaaagaagtcttatctagtctgaatttgtccatttcggtggatagcaaaattaattatgggactgctgtttctatacataaataaagttatgtaaaataaaatatttacataactttatttatgttactatagtttatctaaagcgttcttttgttcatcgttaacaatatgggtatataggtcagtaacttgagtggaagcatgacctagttggtggctaactaatacttgagattttgtagcatcatatagcctagtagcaagagtatgccttagtttatgaggtgttacacgaaccttaaaatcctgggaatacttagcaaccattttctctacacttgaagcatcaatacgatttggcaccccacggtattctgataaaaatagagcaatgtcctgattttctgctttgtatctatttttacggatgtctaaataattagcaaggtagggcttcgcaaagctagcgacattgacagagtcccttttccccccttttcgtgtgacatcaataaccattacattaaggttaatatcctttaaatctaagtttactgcctcagatagacgcactcctgaagctagtagcaaagcaataatagctaaatctctctctttatttttgttgaaaaaagctaaagcacgtttggaaagtttgttttgatattcacaatctatatactctaagaattctatcgtttcattgcccaaaaataacttttgtttaatattttctgcccgagaagctaaagtttcctttttctttttggttgagacttttttcatgacattgcgataaaagtaaggctccccgtcagcattctcaacctcttcagtaaggtatttgaaaagactagataaggcagatagagttctgttaatggtggtttgagacaccccattttgccttgtgttagcatttaataaagggcgttctcgtaaatatagtataaaagcttccatatcttttttagtaaggttttctaaaactgaaagctcaatttctgcaatgtgatgacaattagcaacaccagaatccaataaccattcaagaaaacgtctatattcttttaaatattcgtagagtgttgtgaaactataaggaacagaaagctttgattgataatattctagaacataccaaggcataatttcttttagttcatcgattttttcgagtagtaattcacgtttcataataaaatctccattatatctataaatagaagtatatcatactctatcataactttcaagaaaattatagtttttcggaaagtttaaaagttaaaaacaggaattcattcggtaagtatatcaaatatccattctttatgatgatcagtattacttattatcgtttaacatgtttgttatagtaaagacagagtattttgagaaaactgattcataatttcattgattttatcggtatctgaaaaggtaataaagtgtactcaattatttttaattatatttgcaagttaataaccaaagttaaattctactttaaaatatactagttttctcaatattagatctactatgtcttataaaaatcagaagatttgaaatatttctttctttcttgaaattttatgatataatatgtcctatatctttatagaaggtttaggaggactggtattatgtctagttttaatagaaaaaaacttaagtttttgggtatatctttggcgactctaacagccaccacagttaccctggttgcctgtggtaatgagtcaaagaactctggagataataaagttattaattggtatattcctactgaaatcagtacattggacatttcaaagaatacagatgcttattcaaacttagctataggtaattcaggcagcaatttacttagaattgataaagagggcaaaccaaaacccgatttagctaaaaaagtatccgtttcttctgatggtcttacttatactgctacacttcgtgataatttaaaatggtcagatggaagcaaactaagcgctgaagattttgtttacacatggcggagaatagttgatcctaaaactgcatctgaatatgcttacttggcgacagaatcgcaccttttaaatgctgataagattaattctggagatattaaagatttaaataaacttggtgtaacagctaaaggcaatcaagtgacctttaaattgacaagtccatgccctcaatttaaatattatttagccttctctaattttatgcctcaaaaacaatcgtatgttgaaaaagttggtaaagattatggtacaacatcaaaaaatcaaatttactcaggtccttaccttgttaaggattggaatggttcaaatggtaaatttaaattagtcaaaaataaatattattgggattctaaacatgttaaaacaaatagtgtcatagttcaaactatcaaaaaaccagatactgcagttcaaatgtacaagcaaggtcagattgattttgctgaaatatcaggaacttctgctatttatcaagctaataaaaataataaagatgtagtagatgcgtctgatgcacgtactacatatattatttataaccaaactggttcggttaaagcattgacaaatcagaaaattaggcaagctttgaatttagcgactgatcgtaaaggtgttgttaaagcggcagttgatacaggttcaactcctgctgaatctctggtccctaaaaaattagccaaattacctaatggtgaggatctttccaagtatactgccccaggttatacgtataatacaagtaaagctcaaaaactttttaaagaaggtcttgctgaggttggtcagtcatctctcaagttaacaatcacagctgattcggactctccagcagctaaaaatgctgttgactatgtgaaatctacatgggagagtgctttgcctggtctaactgttgaagaaaaatttgttactttcaagcaacgccttgaagatgcaaaaaatgaaaattttgatgtcgtgctcttctcatggggaggagattatccagaaggatcaactttctatgggttattcacgactaattctgcgtataattatggtaaattttcttctaaagagtatgacaatgcctatcaaaaggcaattactactgacgccttgaaaccaggagatgccgctaatgattacaaaactgctgaaaaagctttatttgatcaatcatattataacccagtttattacctagggaaaaaaggactccaaaattctaaattaaaggggttggtaagaaattcaactggtttgaatgttgattttacttatgcttataagacagaataaaagaaaagcgttaggatatttctagcgcttttctataccaaaagtaaccaatgagttatcaaaacacttataattgagaacaatgatccaattaaataatattcggcaaaaacctgacttttagaaattttatcgtaacgtgcaatggattttgcagtaaaaacaagacctatagcagcatactgtcctgagattagtaatatagccataattagacgctctaaattaccaatcatagctcctgctccttcaattgtttcttcatgatcttcagatttttctttcattatttttgttttttcttgtgttaataatgatgataattctttagcttgaaatttattaaagaaaattttaaacacaatattaatgggtttggtgataatgataaaaaccagagctatgacaataaagtgcttgataggcaaaagccaatgattaggcggtaaatatgtaggaagcgcatggtaaaaaacgataatgcaagtatagtgggctagttggtctataataaaagctgctttttggaaatgcccttcctctacccaagggtaactcaatttctttatactatcaataacaatatgacttccccatatgcttaaatttaacaaagtagtttctggtatcaatatcattaaagctgctagggggaggaaaacaatcaagagatgtctccagagtcccctccaactatgtgatttactatctgctaaggattgactttgccactgaaagtcagctaaaaaatgtgcacaaaataataaagttaggattggattatcccttaaaaaatcagaaatcatagcttccccctttagtttgagtgcaacttttaactaatagatcggctgcctgtgttctcgttcttaagtaaatcttcagaccgcttgctttaaggcgtttagtcagcgcactaggttcaatattttccagttgggctaacttttgatgttgaaattgttcttgataattatcttgaagtattaagtgctcaagcatttgaaaatggtttgtagtccattttgacttgataaaatcaccagctgaaatgagactatttagtgttaattcaaggttttggtcttcatcatcaaggcaaatagctacttgaactgttccataatcatttttatcatgtatatgattaatagctgagcgagcatgccagtaggcaggaccatcagcaccgatactttcatttgaattgatggatgttataatgtttcctgtaccgaggccgaaccttacattaacaggttttagagctagttgaatatggtcaataatttgaaataccttttttgatggtttcaataaagcttgaaattcatcaccagctgtaatagtgaatggagaaatcagctcttcaccatatacatcagatagttcggtcattagttgctgaaaagactgttggaaagtttcacgttcaagtatctgttttgaattaatgatatcaccgattaatgctaaatacataaatatcaccacctttttgtctattatagcagacaaaaataaaaatgtctatttaaatagacatttttatttgcgtttcttcttagctttcttcattttattagccatacgtttcattgattgtttagctgcaaaggctcctacttttccttttaagccaccaccaaacatttggctgaagtccatatcgccacctaaactagataagtcaggcatgccattttgccccatcataccttctaaattagacatatccattccgtccattccaggcatatctttagggaggttattaggatcaattcccatttttttcatcattttattcatatcaccggacatcacgccttgcatcatttgttttgcctggttaaaatctttaatgaatttattaacatcaacgaaagtattacctgatccagcagcaatacgacgtctacgacttggattgaggagatctggattttctctctcttctggagtcattgatgacacaatggctcttttgcgagcaatttcgttttcatccactttgaagtttttcattgctggattgttagccattcctggaagcattttaaggagatcttccattggccccatattttgaacttgatctaattgatcaataaaatcgttgaagtcaaaggtgttttcacgcattttctccgctaattccattgaacgtttttcgtcgtattcttgactagcgcgctcaataagtgttagcaggtctcccatccccaatatacggcttgccatacgatcgggatggaaagtttcaatatcagtgattttttcccctgtccctgtaaatttaattggttttccagtaatttcgcgtactgaaagggcagcaccaccgcgtgtatcaccgtcaatctttgtcagaacaacaccactaatgctgagctgacggttaaattcttcagcgacatttgcagcttcctgtccaatcatgctgtcaacgacaaggagtatttcattaggttgagctatggctttgacatcatgcaattcctgcataagggttgcatcaatttgtaggcgtccggctgtatcaataagaacatagtcattacgattttcacgagcctgttctaaacctttagtgacaatctcaactgctgaatggttagttcccatatcaaagacaggaacattaatctggctaccaagggtttttaactgatcaatagcagctggtcgataaatatcagctgctatcatcataggacgagcattgtcttctttgattagtttgtttgctaacttaccggcaaaagttgttttaccagcaccttgtagaccaaccatcataatgatggttggaattttaggggatttttcaatttcagaggtctcagcccctaataaatctgttagctcttcattgacaatcttaacaatttgttgcgtaggatctagtgtatcaatgatttcatgtccaacagcacgttcacgaacatgtttaataaaggttttaacaactggaagagcaacgtcagcttctaaaagagctagacgaatctccttggtgacttcttgcacatctttttcagataactttttcttaccacgaatatttttaaaaactccttgcaggcgctctgttaaactttcgaaagccataaattatttctcctcatttaatctctattatcaatgctacttagaatggaaattttttcttgtaaaaaggcatcatcggtatatttttctagaatgtcatcaaaaatctgactacggacaatataatctgaatacatatgtagtttcatttcgtacgcctcaagaattttttcagttcgtttgatattatcatagacagcttgtcggctaacaccggattcttcagctatttcagcaaggctgtagtcatcggcgtagtataactcgatataattcatttgtttatctgttaataatgccgcataaaactcaaaaagggcattcatacgatttgttttttcaatttccatagcttttattataccaaatttcctatcagcttgctatatcaagtatgcaagaccactttaaaatttaaaaggttaggactaacatggcctaaccttttacttttggtagttttatcttaaaaatactgcctctaggtttattatcaattactgtaatattacctcgcagtgagttaacgatttgttgagctaaagaaaggccgaggccaaaccctccttgttgtcgtgttcttgctttgtcaacacggtaaaaacgatcaaaaattctgactttatcctcctctgaaattcctggtccattatcagcgatttctaaaaagagatacttatcagtttcagatatggtaaagtcaatgctaccatcattgtcagtatattttatagcattatcaaataaaatagtcatgagttgttttagcagtgtcttatctgttttgaaactatcttggatcatattatgtccagtaaaatttttaccattctcttgggtgattagatcataattctcaaagatactatcaaaaagtgtaggcttaataacagctaattctggtttgattccatcatcacgtcttgctaagtttaaaagattagtggttaaaatacgcatatttcgtacttcatctagacttgaagcgatattttcactattttctaaaatggtggcattcggttttctgaatagcgtttctaggcgattttgtaagacagctaggggagtacgcagctcgtggctagcattttcgacaaaagccttctgtctttcgtagttttctataatcggtttttgtgcccatttagctaagtagatacttgctccaattgaaataatccaaaaagtagtcatgacaaatataataattttttcatagcgttctttagcatttactaattgatcaatattaacaatagctgtcatgtaagtcacattaggataagcagggttattaacttttacggtgacagcatgatatgtctcatcttgaccaaagatgttggttaaagttaattcactaatgccacctagattttttttattaggttttaaaaactgatagtttgaaaatgcgtcaaaatagttaatgacttcttcttctgatgtaaaaagaataatatcagtattagctactgtctgaccgccgggttttaacttgacacttgcgatattggagttatctaggtaggcagcagtacgtgacataaccatattgatgtaatttttaggatgggtactgatatactttaaactactatcaacagaagaataaacaccatagcgcatgacttggaggatgataacagtcataaccagaaaaataccactaaaaactgtgaaaaaatggataaaatgactatctgagacattttttttgaatttacttatcttaatcggtttcgacatgctttaaaatatatcctacactacgcaaagtttgaaggttttctgaaaaaagtgttccttttaattttttccgaaccttagagacatagacttctacaactgaaatcgttgtatcactatcaaatccccaaatacgatcaaagatttgagatttcggtaagataacattttgattttgaaggaaatagactaaaagatcaaactctttacctaagagctcaacttctgtttgattaacaaaggttgagttagtagacatgtctacgcgaatatcaccataaattaggctgttatcattaaattttccagaacgctttaaaagagcctgaattcgcatttttagttcttctaggtaaaaaggttttgttagataatcatcagcacctaagtcgaaaccttgtcccttatcatcaatgctttctttagcggtcattattaatacaggggttgtaatacctttttcacgtagctctttcaacacttggaagccgtttttttcaggtaacatgagatctagaagaatcagatcatagactccactttcggcttcgtaaagaccctcttctccatcaaaaatttgcatgacatcggcaaagtcatcaaggaaatcaaaaacggaattggaaagactcaagtcatcttcaattaataaaatttttatcatagtatatcctttcgatgtacatattttatctgaactattaatattagaataccaaactttgcttaataaatcctaaataaagtatgttttatgtcaactaatttcatgacacagacaaagaaatagagattgaataatccatcaatctctatttgagtttattagatatattttttgatagtattgataacttcttctttttgcttcgtgattaaaaggacacgagcagaaatttctttaattcccattgaaatattacggctaatcgccatatcgcttaattgaggctcgaaaaagtttttatattgttcaaggcgttcttctgttttgaaactacttgagggataaatcacaaatttatcaaaactcatatcaccacctagagttgctttgatccattcccagttttcttgggcccactcccagacactttcttgtgtaaaagaatttttaaggaaagtagcataccaactcatagctaagtcttgtggtttcacaatatctttatttttccaatctgacaataatttcttgagtgtcttgctatctgtagtatgagataaagcactcgctagttgtcgtttgaaattcccatcggtagtagtactataagtctctaataacaagtggctaagttctttggattcgaaatgcttcatttcattggtaagaactaacaggcgaattgcagctggtatagcagcgatattattttcgtgggctttaaaaatatggtgagcttcttcaatagcatgttcattatctgagtagagagcaaggcttagggatagatgacggaccatttcgctatcatctccttctccttctcttttttcaaagccaagtctattaaaattaaatgctgataatttattaacaaattctttaaagtcgaattcatcttggctatcttcctggacgaataaggataaaccatcaataacactcttaatagcagagttaacaagatatgatgtctcttggctcaaaagagagactaaaggtattaaactactatatgaaatcataccactttcagcaagtaaatgacgttcttgtacaatttgtagtttagaaatgttatccataagaggaagatcagaaatgatatgctctaagagttgaccttgatagttagtaatgtaatgtgcagtattttcagtattgaaacgcagtgcaccattttctttgttcttttcagctaactgactaaaattggggattactaccgtttcctcggttaatatctctgggattccttcccaattactattaagaggaatttgccacaagcgagacttatcttcgtgttcaccaataaagaattgtttttgagttaaaatgagctcatcttcttctattttggctgccatcacagggtatcctggttgctctaaccaagaatccatgaaagctgcaacatcttttcctgaggtttgagaaagtgcattccaaaggtcacgaccaatagtattttgatattgatgtttttcaaaataaatttttagtcctgcggcaaaatctgtatcgcctaaccagcgacgtaacatgtgcatgaggcggctaccttttgcataaacgatagctggatcaaaaagtgtgttaatttcatcaggatgattgacctcaacgtgaacagattggacgccatctgtggcatcacgcttaagagctaatggtagaccacctgtttgaaagtcttcaaatatattaagttttggttcaatataatcaattgatacatattccatcatattagcaaatgattcatttaaccataaatcatcccaccatttcatagtaacgaggttaccaaaccactggtgagctatttcatgtgctacaactaatgctacttgctgacggctggaaacactagagttctcatctactaaaagatagacttcacgatatgttactaatccccaattttccatagctccagcagaaaaatcaggtagagcaacgtggagtgactgaggaataggataacgtacaccaaagtagtcctcataaaactcaataacacgcacaacgatatctaaagaaaaatctaattcatttaactgatgggcttttgtggcatatgagccaacaagagtgccgtttttggtatgtgttgttttaccatgcaattcccccaaggcaaaagctaataaatatgaggacattttaggtgtggtgtcaaatgtccataaacctgtttcttgacgttgttcagcattgatttccggcatatttgaaagagcaatctctccttctttttgatcgaattttaggctcaaatcaaaggttgcttttgcttctggttcgtcaatacttgggaatacttcacgagcaaaatgactttcaaattgtgtggagataacctcttttttgatgccattaactgtatagtaagatggatacatacctgtcatattatcggtaatgtgaccgctgaattcaaagactaataccatgctaccagtttcatgcaattgaatatgcatagcttcattgtcttcatctagttggaaatctaatggttgattatctaataagacagatttaatggttaaccctttttggtgaaaagagatattgttatctaaggcttcgccagacacagcaacgttacctgaaaaggttttagtttgacgattaatatccaagaaaaggttatagttttcagggacaaatttggtaacaaaatgttctacagttttcatataactcctaactaattcagaaacatttgaaacattactagtcctgtatgggctagaaaagatagaaaagctgtaacaagatagttacagcttttctatcgcacgaactatacttacaattaccactctacaagcaataattatatcataactcgataatttttccagtttttaaataaacaatccattcacagatatttttgccataatctccaattcgctccaagtgcatcaatacttggaagtattctttggcggcaaatgctacgtcaggatgcttttgaattgtttcaactaccattttttggatatcacggaagtaatcatcaactatttcatccattgctgctacttcgtaagctttttcatcatcaccattgatataagctgttaaggcttcttcaagcatgtttttaactgcttttcccatattattgatttctaattctactgctgggattctttcctcgcccttcatacggatggttgcttttgcaactgctgctgcatggtctcccatacgctcaacatcactagtagcttttaaaacggtaataacggtgcgtaagtcttgtgatacaggctgctggagtgcaataatttccaatgattttttctctaacttcgtttcaaagttgttaagcgttacatcatcttctatcacttctttagctaactctcgatcatgactgacaaaagcacgaactgtttttttgatttgtccgatagcttcaattcccattgcatagaattggttatgcagtttatctaattcttcatcaaattttgatcttaacatattgtattctctttctgatcttattatatggtattaaccgaatttacctgtaatgtaatcttcagtttctttatgtttaggattcataaacatttcttttgtattgccatattcaattaagttaccgtctaagaagaaacctgtacgatcagaaatacgtgaggcttgctgcatagaacgtgtaacaagtaacatggtatattgatcttttagaccatgtaaagtctcttcaattttaccagcagaaattgggtcaagtgcagaggttggctcatctagaaggataattttaggcttggtagcaagggttctggcaatacaaacacgttgttgttgaccaccagataaaccaagagcagagtcgtgtaatctatctttgacctcgtcccagatagacgcgcccttcaatgaagtctctacggcttcatctaacgtagctttgtcttttattcctttgagtctaagaccataaacaacattttcaaatactgacataggaaatggattaggctgctgaaaaaccatcccaatttctttacgaagttctacggtatcagtgcgcgggctataaacattatgtccgttatacatcactgctcctgttagagtgacttcaggatttaagtctcccatacggttaatagctcgtaagagtgttgactttccagaaccagacggaccaattaaggctgtaatttcattaggatagaagtccattgagacttcttttaaagcttttttcttattatagtaaacagacaaatcactgacttgtaaaataggttgtgtcatcttttacctcactatccaaatcgaccagaaacataatcgctagtagattgacatttagcattttggaaaatgttattcgttttatcgtattcgattaagtctccaagatagaaaaatgcagtataatcactagcacgtgctgcttgttgcatattatgtgttacgataattatagtgtaatttttcttgagttcaaacattgtctcttctagttgcatagttgcaatcggatcgagtgctgaagcaggttcatccattaagagaatttctggtttaactgcgatagcacgtgcaatacataatcgctgctgttgaccgccagataaagtgaatgctgatttatgaaggtcatcttttacttgatcccatagagcagcttgttttagtgaggtttcgacaacttcatctaagaattttttatcttttacaccagcacgctcatatgcaaaggtaatgtttttataaattgattttgcaaacgggtttggacgttggaaaaccattccgatatgttttcgcatctcgtaaacattgatatcttgagcgttaacatcaattccttcatacatgatttgtccagtcacgcgtgcaatatcaatcgtatcattcatacgatttaagctacgaagatatgttgattttccacatccagatgggccgattaaggctgtaattttatttttttcaaattgcatatcaattcccttgatagcttctttctcaccgtagtaaacgtgtaaatcttttgtggtgagagctgaattttcttcagggaaggtaatgatatggcgttcgtcccaattatattctgccattactactccttttaattagacgaggttaatttcgaatgaagtttcttaccgatcgagcgagctgaaaggttgaaaataagaataacaaccaataagactgcggcgctaccggcagatacttgtgttgcatcagggattgtcccttcgctattaactttccaaatatgaacagctaaagtttctgcttgacggaaaattgagattggacttgtaacactaaggacgttccaatttgaccaatcaagtgctggagcagattgaccagctgtataaataagtgctgctgcctcaccgaaaatacgtcctgaagctagcacaacaccagttacaatacttggcagagcttcagggacaacgacgtaaatgaccgtttcccaacgagaaatacctagggccaatcctgcttcacgctgtgtgtggtgtacattttgaaggctatcttcaacactacgtgtcatttggggtaagttaaaaacagtaagtgctaaggcacctgagataattgagaagccatattgaaattgaacaacgaagattaggtaaccaaacagaccaactacaacagaaggaagagatgacaaaatttcgatacatgttctaacaaagtttgttaaacgtccttttttagcatattctgagaggtatattccagctcctaaagatagaggaatagaaataatcagagtaacaataagtaggaaaaaggaattgtataattgtattccaataccgcctcctgcttcatatgatgatgatttcccagttaaaaatgaccaagatacgtgtggcaatccgcgaacaagaataaaaattaaaagagaggcgaggattgtaacgatgatagctgcaatactatagagtattgtagttgctaatttgtcagcctttttagcgttcatagtttttctttccttcccttgtaattaacttaataactgtattaaatgctaaactcataattaaaagtactaaggctagcgaccagaggacattgttttgtacagttcccattacagtattaccaatacccattgttagaacagacgttaatgttgctgctggtgttgtcaatgacgttggtaaaattgcagagtttccgacaaccatctgaattgctagagcttcaccaaatgcacgtgccataccaaaaacaattgcagtgaaaattcctggacgtgcagcgtttaatataacacgccaaattgtttgccaacgagttgcccccatggctaaacttgcttctttatagtgacgtggcacagctctaaggctatctactgtcatgaaagtaacagttggtagaatcatgacgaagaggacacagaccccagataaaatgccaaaacctgttcccccaaaaatagagcgaacgaagggaacaataatctgtaaaccaataaaaccgtaaacaacagaaggaatcccaactagtaattcaactgcaggttgtaaaattttagaaccatatttaggtgagatttcagtcataaatacggcagcaccgatagcaaatggtgtagcaatgatagctgatagaatagtaacaataaatgatccagctatcattggaaaagcaccaaatgacttagcacttggttcccattttgtattaaataagaagtctgttaatttaacgccatcaacaaaaaatgtagatagtcctttttgagcaacaaaaatcaaaatcatcgcaacaatgaagacgattagggcaagcgaaagaaaagttattcctttaccaaatttttctaatcgagagttttttgaaggagatgttaattttttagctaattcttgatttttcataattcctcctaggatcaagatgctttatctagatgtgattaagttttattttggggttactttaccttcagcatctttaacaactttcatgtcgttaatagagatatatcccatatgttgtacgatactactttgaactttatcacttttcatgtagtctaagaattcttttgttagacctgtttcattaccttttgtatacatatgttcatatgaccaaagtttccagttgtcggtagtaacatttttagctgttggcgcaaaaccatttagttttaatgttccgacagatttatcaacgtatgcaaaagcgaggtatgaaatcgcaccaggtgtttgagaaacaattgatttcaccataccatttgaatcttgttcttggctttgaataggagcaacatttcccataatagtattatcgaaggttgcacgggatccagaacttgctgctcgattgatgatggaaatatctaaatcttgtcctcccacttctttccaattcttgatttttcctgcaaaaatatcacgaagttggtgggtggttagatttttaacattaacttttttattaacaataacagctaatccagctactgcgacttgatggtctttcaatttcttagcatcaataccatctttttcttctgcaaataagtcgctattaccaatttgaacagctccagactgtacttgtgataagcctgttcctgagcctcctccttggacattgatagtcttaccgaggtttgtcttaccaaactcatctgctgcagcttctacaagtggctgtaaggcggttgaaccaacgctggtgattgattgacctttatcaatccaattagcacaaccagacagcgtcaataagacggtggctagcaaggttaacaaaaaaatgttttttttcattttcattttcctattcttttgaataaattttgatatttagtagttgatatatattactaaaatcattgagtgtttaatgatttacaaatagtaaaaacacacatcactgtcccatagtaccataagtttctagggtttgaaaagtatttctttttccttttttattaaaagtattcaataacagttatgtctgaaatcgtagtcctttagggtaataatttttaagagtattatttgtcacttttgcaaaacctaatccattgccttttacaagaatttgataccaaccgtttggaacagtcttgtctagtttgactacatttccagatacgtacacctcaaactgttctatatcaatttcaatagactgtactaggtcatgttcgctaagtgccattcctaaagcaaacgatggctcaaaacgattcttcttgaaagtgcctagatggagaccattgcgtgctatttttaatttagacaaatcggggagaccattaggtagaagatagagttggtcgccgaaaacatctaaaacaccgttcaagtctatctttaaatggtcttgtgcaaattgttgccacaattgtaactgcattttatttattttctgtgcttttggcttaattttctgtgcttccttagatctagtatctctcagttttgcaacgaattgtccttcaccttgaaaatgatgagggtacatccttgcaacttgtggtacattaatcccttcaaccatcccatttagtttaggaatatcaacaagttctaagtaatcatactcttgaaggagccaattaaccacttcttcgttctcttctggtgaccatgtacaagtagagtatacaagtataccaccatgagctagcattttgattgcttcttttaaaatatctctttgtaactgtgcacattcagtggggtaatctttgtgccaatattgtattgcttgaggatctttgcggaacattccctcaccagaacacggaccgtcaaaaacaataagatcaaaaaaagaattaaaacatttggctagtcgttgggagctttcattagtcacgataacatttctagcaccaaaacgttcgacattttcgactaaaattttactacgtttatttgaaatttcattactaactaatagaccagtattgtttaaatatgatagaaggtgtgttgtttttccaccaggtgcagctgctaaatctagcactttcattccttcttgtggttcagcaatctgagccactatctgagcagcaggttcttgagaataaacaaggccagttgtgtgttctattgattttcctgatattttcccataatgcccccaaggggtacttgggatggcatttggaaaatcaagttgcttttctttgagaggattggtgcgatatgccgatatgggtttttgttcaaaactgtcaaaaaaagcttctgcttcatctttaagtatagtctgatatttttcaataaattcattcggtaatttcatgtttctattatactacataatcacgggcgtgcaaaaaaaccttctatttaattagaaggttttaagtttattttttggtaaggtaggattggataagatttaatttcgactttggtaggaacattactttttgtcttgttgaatagttgggttcttccccgtcaagcgttaataaggtaaatcctaatgtctcccccatgatttttgctgcagcataatcccaaggttgaatatacgaaaaataagctaataatttgccctgcatgacttttgccatgctaattccagcaccaccatagatacgaacacctaaggtttcagaagctaaatgggcaataccgcaatcattttctgcatacatagcagaatttactccaagtaagcaacgttctaaaggacactcttgaaaaggaacaatttttttatcgttagcatagacatcaaaatgtcctcccccgctgtaaagaatatcagccataacgtcgtagatgataccaaattgtccaacgccttcttcgtaataagctaacataacagcaaagttatctttttgaacaataaaattaacagttccatcaatagggtctaaaacccaaacattaccttgtgcaatgggtgagcgcacatcatcttcttcggcaagtatattatcatctgggtaatgttgaataatttcttgaattaataatttttgtgtttttttatcaagacttgtcactaaatcatcaaatcgagacttttcctcaacatcaaaagtattttgcatctcagatttaatgaattgaccagctttatacactaattgtttagcgaaatcaaatttagcgtccaagtgaaataaatcctttcgcttgttgttgtgctgctttaacagcttgataagtggaataaccgctagttctctggaattcacggtcaatttgtttttcctgcgccttggatttaacaacttttttaaattctttatagctatctagcaaatcatcaactttaatactattttcataggcgtgttcaacttgatttaaaaagcgaagtaccttagtaatatcttccgtattccatgaaggatcaagaggataactataattactactaatcatgttttccctcaatttcagcacgaatagtggcctgtttcagttcttgtttacgatagtcacgcggtaagaaggcacgaatttcatcctcattaaaaccaatctgcatacgttttttgtctaaaataattgggcgtcgtaaaagacttggattttctgaaattaattccattaatgaagacgttgataattcgtctacatcaatagcaagtttttgaaagacttttgaacgtgtggaaataatgtcttctgtaccattttctgtaaacgatagaatttgtaatagttcttctttattgagtggacttgtaataatgttatgctcttcaaaagcaacctcatgcttacttagccaagcacgcgcttttcgacaactagtacagctgggtgataaaaataaggtaatcatataaccgcctcttgtatttactagagactattatacaaaaaattaaagagtttgactatcttttttccaatttaaagcaatttctttatcttttttaagttgttttacaagatcgtcaataccattaaactttaccatttctctgattctttttaaccagaaaatttcaatagtttctccataaatgtcgccatcaaaatcaaagatattagcttctaaacgaagttctgtaccaccaaaagtgatattttttccaatgctcgtcattgctctataatattttccattaatcagaacattggaaatataaacaccgtctgcaggtaagtaagtgcgattaataggagctagattagcagttgggaaccctatagttcgtcctctagcatctccatgtactaccatgccacaggttgaaaactcataacccaaaagttggttagctttctcaacattaccctctgtaatcaattgacgaatacgtgtagaagagattttttcaccaccttcagaaatttcatcaataatatagactggtcccttgaaattacgcgctagataatcaccactggtacgattatgaccgaacttataatcaaaaccgacaacagcagcttttgctctgagaccataaatatatttcttaataaaaaggtcagaagatacttttgaaaaatgactggtaaaattcattaaatataactcatcgacgccatactcttgaaatttttcagaacgtttttctggagaggtaagatgtagcaataattcaggttggaagcgagcgaaggttagacgaggtgtctcattaaacgttaagacgacaattttcaaatttttttcggtcgcgatttttttagctttatcaaagagggctttatgtcccagatgtaagccatcaaaatagcccaaaactaagacgcaatcttctttagcttgaatatctttataatcattaatgtaatggattttcatgattgactttctttataacaatactttgtgtggtttaaattcattgccacgtttttctagtatagcgataactctattttcataaaaagctgctaaggtatctgcttcattttctaataagatacgacgtccgtatgagatttcaactttatcttcctcagttaggttaacttttgggagatctaaaacaccatattcaattggaagtaaaaatgaaaaatcttcttgcttatatttttcattaatttcttcaagcgttaatgattgtgtaatagataatcctgcagatgaggttctttttaggaaagacatatggctagcatatcctagttttattcctagatcaacagctaacgtcctaacataggtacctttactgcatgagacatagaaactaaaacggcagatgcctttttcgaagtacaatgggcttgtgcgtctaaattcagaaattgttatttgtcgtttaggtcgctctacttcttctcctgaacgagcatattcatagagttttttaccatttactttaactgctgaatacataggaggaacttgtgtaattggaccggtaaaacttttcatcgcatgatccacaacatcctcgctaagatcggattgagttagtggagttcttgaaatgacctctccactagaatcttctgtacttgtggcatatcctaaagtgatttctccttcataaattttgccactttctgtcatatattcaataacacgagtggcttttccaaccgcaattggtaaaaccccaacaacatctggatcaagagttccgccgtgtcctattttttttgtatgtaatatctttcgaagcttgaatacagcatcgtgtgatgtcattccagcttctttctttaaattaattattcctgtaatcatgttttatattatatcagtaaataagcggtaacacaaagaaaggagcgtaaaaacttacgctcttttggtatagtgctataaggatttatacctaatctaaatagtatgaaaagcctgtactaaccttcttgaaccctaggttttcataaaaatgataagcttcctgacgatattcttttaaactgctatttaaagccagtacttcacttccatctgttttagctagctgtttaacgtgattaataagttgactagcgatgcctttacgacggtgcttttcattaactactagtgctaaaatacgatagtaagtcccacttttttcaaaaaagtaaagtttatgatatccaacgaaggcgaggagtttgccattatcctcagctatcaaaaagccataatctgaatgagtaagaataacctttaaaatagattgaatctctgataatgatattgcgtatcctaattcttgatacaaagggactaatttttcactatcgtctagtgtagcagttctaatcttcataatcataacctcttagtcttttagagcatcgaattttgctttcattgttggattttttcttgttaatttcttgacagaaacatcgtctaatttattatttgcaagacgtagttgattttcagacgttgttaaagcagccttaacagcttccatacgtttaatagatttatctatttcatcgattgctttctggaaatttttgcttgcagaattataatttttagcaaatgcatttttgaaaatatctaaatcttcttcaaaatgtgtgatgtcaatattttgttctttcatcaaagcaagctcttgtttatattttaaggtattgagtgctgcatttcttagaataccaattaattggataaaaaattgtggacgtataacgtacattttagggtatttgtgactaacatcaacaattccagtattataatagtcattgtctgcttcaagcatagttactaaaactgcgtattcgcaagatttttcacgacgatctttatctaattctttgaaaaaatcttcatttttatgcttcttgatagtatcatcagactcatttttcatttcaaacatgatacttaaaaactcaaggtcattttcatccttttctcgatagataaagtccccctttgagccacgacttgataatgtattgtccttctcaaaataagcattaggaaaggccaaatgtcgcactttattaaattctgtttcagcataatgttctaaactttctcctactgctttagtagactgttgagctttgaagtttttatagaattctacttgttcattggctgcctttagttgtacttcataatcactttttactgaagctaaagctaaatctttttctttttcttgaatgtgcaactgattttgtattgcatctctttctcgttcgacttttgttagcgcctcttgcaagctattttcatgctctaaacgtagtctatcgatttggttttcaaggtcgcgaagcatcatgtctttttgatttaattgctcagcgagttggtactcattgtctttgagaagattgtctttttctataagaaattgtttgactttgtactgaagtttagctatctccttgtctttttctacaacaacttcctgtaattgattttttgcttgctcccctaatattagacgttctttttccaaccgttcacttacttctttgtcaaaagcatctccgcgaatttgttctagtaattgatggtattcagactcgttgatggcaaaagctgttccacaatgagggcatttgatttcgttcatgataactcttcctatgatgttttgtatttggttctagctaagttgttgtctgatgtcattttggatacgttcccactcctgctctgcacgtgctatcttacgtttgtaatcgttgagcccctgtttataacgttggataagataatcctgtctaaaaagcgggatacttggtattgcaatatttaacagttcctttgtgctaatattcatcacagcttttcctttgttagcattctcaagtgcctgttgaccttcttctgaatcaaaaaaaagctttaagtagtaccctctaatgtgttgtgtaggccttagtattgtaatattagcagaggcaacgacagggtaatcttgctcttcaaaaatagcaactttcttgacagttccttttgaagcgattaaaacatcgccttcctgaagtagatattttaaaagcgatcgttgttcatcttggaatgttcttaagttatggtagtcaattcctaaaggagacatatcactcaaattaataatacggatatcacctgcttctgcttttgaaggcacagctttacctttaaagcagtctaccaattcagataataaataagtttttttctctgggttacttgttggattttgtggcacaatagactcctttcgtctttaaaatattatatcacaaaacatagttttttaatactaaaataaaaaataagctttcagtaagagaagcttatttagattaaatctattagtcgtaaggaaaattcgatttttgataaagccaataacatgctacgataagaacaatactggtaatcatgcttccttccacaccaaattttccaccgctaatccagtcagcaccataggttttaacatggactagggagttagacaacattggctctccactaacttcgattccaaagacactcccttgtacacagttccaggcgccatgaataccacacgccccccagatgttaccttttaaaataacatagagcgatagaaatagtccaaagagacacagattgaaaatcgagataaggcttacatgattattagcgctatgcagaagaccgaaaaagattgaactgatactgacagaaactatcttactatactttgtggcactcaccggaagtaaccatccacgacacaatatttcaacagatgcgctttgtacctgccatccaacagcaaaaataagaaaccaaatcaatttatcagctgtaaaacgaacagtttcgataactccagagcctgaaattattgttaatattaagcaggctccaaagagaacgctcccgactaaccatcctctagataattctgttagggctccttctttaaatagccctagagaactaattggacgcttctctttaaatttcacccacataaataacattaccgtactaattgaagttgctagtaaaatgattaactggacgatatcgctatcccactctagtttccaaaaatcaagcgagataatcaattcaataataatataggtaaggaaatctgctgtaaatagtaatatcaaagccaataatatagttaaaaggacatgccttgatactttaccttttgcagtttcctcaaaaatagactctctcataaatatctcacttttatctaactttatactgttatattatacaattaagattacttgctgtcaatcgttatcgaaaagattagaaaagataatctttattataaactaatctactgatttcaaggcatctaacatattgagtttttttaattgatggttaactataaaacctagacttattagaatgatgactactacgcttattggtattataaatgtagttggtgatactttttcaccaaaaagtatttgatctgaaccaattagcaacatcatttgacggtgtaaataagtaccgctaatggtgcctagaatcacaccgatggttgataaaataatggtttcgcggtaaatgtataaagttacttcttcattataaaaacctaatacctttatagttgatagctcccgcttacgttctgctaaattaatattagtgagattatagagaattacaatggctaacaataaagatacgacaactaaaatagtcatagagccatctaaagaacgcacaacggcttctacactagccagctgaagagcattttgcgtaagagactcaactccattaatttctaaaagtttttctgctaagttatttgcgattttatgtttggttaacttaaccaaaaaagcgttatctttagcttctttcttaaaaatagttcgatagtattgttttgtcataaaaatatagtgaccaacattcgcattgacaactcctgttatttttaattttctagaaggaagtgtttgtgaatgagataaatggataaaatcaccggtattaacatgataaaattgagctaattttttagaaataataatccctttattattcaagtgcaatgacttattagttgttgcttcttgtaaataaataaaaggtagtaattgttttttgtctgttatgaatagggaaattgactgtttattaatttgtccaggaatggattcgtcaagattttcaaggtgtattggttggtatttgtctatttttgaatcttttgaaagtagttcaagtatttttgggggagaagcatttgtgttatatgttagcaatatatcatagggcataatacgaccgaaatgttcattgacggtttgctttaaggaggattgtattcctagacctgaaaataagagcgctactgatccagcaactccaaatatggtcataatcatcctttgtttgtaacgaaaaatatttctagcagttactttttgtgtgaaggacagttttttccaaatccaattgatatactctaaagctattttagatcctttagctggtggttttggtaataataaaaatgctgctttttctttcaactcacgtcgagtgataacaaaaactggaagaacaatgcttaataatgaaaaaacaaaggctagtaaactgtaatttaagaaaagatgatactgtgtgtttggaatagtcaggtctttggaaatgatatcagaaataatacgaggtaaaagataatgccctccaatgatacccaaagtagtccctaatgttcctgctataaaaccataaataataaatttaaagataacttggcggtcactatagcctagtgcttttaatatgcctgcgttggttctttcttcctcgacgaacctagtcattgttgttaaggttactaatgctgcgactaaatataaaataatggggaaaagattactgattttagaagtgctatttgtactggagtcaaaagtgttatatccttgtcctccaggaaaggtagtacggttgtagacaataatttgaggcgattccattatttgggtgttatgtctcaattttagaagctcttttgttcgtttcaaaagagatagtcggtcttgtttaattttcatttgaatagcttgtctttgagatagtggcatcgctaggctatcattatctaaccgattgatttgtttttgagcttttagtaggcttttttcctcctcatcgattttacgtaggctctctttttttgttttggtatatcttattttattgtgaatatttaattttcgcgataccttttcttggtatttcgctactttttctttgtaacttattgagaaagggttaatcaacctaagatctttaaaagttacccttgccattgtatatactggagagtgaaatgctgtcttatctaatacgccataactatctaagtcgccgtcccctgtttgagaactaccaaggtttgtcttagaccaaatctcggtagaattaacaaaacctacaatagttagaggacctgtatttgaaaacagtttgtttttatcttgtttaaaattaattttatcacctattgcatatttttttcgttcctgaaatgagagagcaatttctgatttatttaaagggagacgtcccttaacaagatcaaaggttgatatcgttttggtattggaatacaatcgataagatttactattctgttgaggggttgtatctacaaagtaagaaaattcaacttgtgatccttttaagctttctaaaacagtttgatcatgtttgtcaagtccccaagaattgaaaacggtaatatccataacatgatgatgagcaaggtaattttgtgctgttctttgcatattaggtgctgagaccttcagtcctataaaagcaaatgagcctaacatcataagtaagaggattgatgaaaatctaccttttgaagtcgtaattgatcgatagatatctttccaaaatgtctttcccatctgtataacctctaatattctatgttctgaatatcacttggattctcgtttattacaatatcactgatttttgaatcatgcatatggatcacgcgatttgcaattggcgctaaggcagtattatgagtaacaatgatcacagttgtttcttttgattgcgccatcttttgcaggatggctagtacttgttttccagtttggtaatctaaagcaccagtaggttcatcacaaagtaacagtttaggttttttggcaatagctcgtgctattgcaacgcgttgctgttcgccaccggaaagctgtgctggaaaatgattgatacggtgtcccaaacctacgttttctaatgcctgttgggcatctaatgcctttggaacaatttctgaagccaattctacattctctagtgctgttagattagggactaagttatagaattgaaaaacaaacccgacatcatatctacggtaacgagtcaattccctgatggtataattagcaatattcttaccatcaattaaaacttcaccttcactattactatccatccctcctagtatattgagaacagtagatttgccagcgccggatgcaccaagaataaccaccaactcacctctttcaatactgaaactaatatcattgttagcaacaatttcggtttcacctgtttgataacgcttataggaatgcttcatttcaatataggacataacggcacctcacactatgaatacacctatattatagcacttttttattaattctcccataaaaataaatacataaattaagttatgtaaaataataatttttttaaaaatctgagctaaacactcagattccactttatttaattttctcttcttggtagtcgcatttttcatttgagcaaacaacttgtttaccaccaccgcgtacttttttctccactaagaaatcatttgatttggggcaagttcgtccaataggtttgtcccaagatgtaaactcacattctgggtagcggtcacagccataaaagatacgattgcgttttgtttttcgctcaataacttgtcctttttgacagataggacaaataacacctatttccttagtgatagcttttgtgttatgacattcagggaaattgctacacgcataaaactttccataacgtcctagttttattaccattggtgatccacatagctcgcaatcaaatccagcaggttcatcctttatttgaattttctccatttcagtttctgcttttgcaagttctttttcaaatggtttataaaattcatcgataatcttttgccactgctctttaccaatctcaacttcgtctagtttcccttccatttcggcagtgaaggtaacatcaacaatatctgggaaaaattctacaataaggctattaacaatttcaccaagttcagttggttcgaagcgtttagctgcaagcttaacataataacgtttttgaatagtctcaagcgttggggcataagttgaaggacgacctacaccgttttcttcaagtgttttaatgagacttgcttctgaaaaccttgcaggaggttgagtgaagtgttgttcaggattcgtattaacctttttaacactttctccttcctccatatctggtaacattttatttttgtcagtatcgttataaacagccatgtaaccatcaaacttgacttggctaccattagcaataaaagtaacaccattttgcgttaaattaactttcattgtgtcaaagactgctgctgtcatttggcttgcaataaaacggttccagataagagtgtaaagttttagttgatctttgtctaaatacttagcaatactttcgggtgtatgattaacactagatgggcgaatagcttcgtgagcgtcttgtgctccagaagcatttttaactttattcccatgtttagaataatttgcaccaaaacggttagtaataaattctgttgcttcattttgtgctaacggactaatacgtgtagaatcagtacgcatataggtaatcagaccttgatgacctgctgtgcctaagctaagtccttcgtacagctgttgcgcaatcatcatggttttacgagttcgaaaattgattttattagctgcatcttgttgcaatgaagaagttgtatacggtaatggtgcattacgacgacgctcttttttttcaactttttcaactaagaattcatcagttttaatacgttttagaactgttttgacgtcttcattattcgataatttgaatttctttccgtctaaaccgtagaaagtggcattgaatttacgtgttccttttttaaaggaaccgtcaatagtccaatactcctccggttggaaagccttaatctcattttcacgatcaatgattagtttaagagcaactgattgtacacgtccagctgataggcctttttttacttttttccataaaataggtgagatagaataaccaacaatgcgatctaaaacacgtcgtgcttgctgagcatcaacgagatccatgttaatctgacgaggttccacaaaagcatttttaacagcatcttttgtgatttcattgaaaacaacacggtttctgtcttctttgtctaaatctaaaatatgcgctaaatgccaggaaatagcttctccttcacggtccgggtcactcgcgaggtaaacttttttagcctttttagcttctttttttaaatcattaatgagaggtcctttaccacgaatattaatatattgtggttcgtaattattctcaaaatcaatggacatacttgacttttttaaatcacggatatgacctactgaggctacaactttatagttacgtcctaagtatttttcgatagtctttgcttttgcaggagactccacaataactagattttttttagcagtagctgatttttttttacttgtttttttggtcgacgtttttgtcgtagttgccataggtatcactttctatatcgtaaacttatagcataataactcacttttcttaaactgtcaatagaaaacttctcctatagtagaaagcaaaacactactgatattcagaaaggatatcttttcctgaaataatgcatttagctccttcttggataagatggtggcatccatctgatttgccatcgataatatttccgggaatggcaaaaacttctcgtccctcttctaatgctctttcacaggtaattaaacttccagatctcatcttagcttcggcaaccacaataccttgacacagccctgcaataatacggttacgttcggggaaatgaaatttcaagggttgttctccggtaaaatattctgataatacgagatgattatatgacatatattcttgaagtttcttattctccgttggataataaacatctaaaccactcccgataacagctatactactgccgccattttttaaagcactaacatgtgctgctgtatcaatgccacgcgctaaaccacttacgataacaaattgattgttagtctccttgataatctttttaacagactgacaacctatctgagatgcctgtcttgcccccactacagctaatttaggtttagatagaagttcaatattaccctgataaaaaagtagaactggtggattatatatttcttttaactctaaaggatagttagaatccaaaatcgatagaactggaaattttttgaattcttgtcgaagttttttaaggtctagctgtttataattttctataaagaaagtaggatttttacattttgatactacggccatattgcgaacagatagagaagttaaactattctttttgagatagttgataatattgtggatattaagatttgttaatccagcttttttaagcttaaatagttcaaaatgattcataaggttacctccattgactatattcgaaaataatagacaaaataaagtgataagatcaatctatactctgaagcattgataatagctattttttcaaaaaaataagactaggatttttcctagcctttgacaaaaaattaacgattatcaacaaagttctgtacatctttaatcatacggagtgttactcggcttccgcctgaattgatataccaatcttttccatctacctcatgaacacgtttgtttttgacagcatcagttgctttaataacatcgttattaaaaagttcttttgatgaagctccttgtccaatagtcgctccacgatctaaaacaaagagatagttaggatttttttcagcgatgtattcataagatacgggagtaccatgtgaacttagtttttcattttcattgactgctttaaatccacctacagagaaaatccaaccaaaacgaccagaaggtgattgagttaaaagttcaccgctgtttgccattacaaatagagctgtaggtttaccttttttctcaatagttttctgcaatttaagaacagcttgtgcgatatctttattaaaggtttttgcctttttattttggtcgaagattttccctaacattgtgacacgctcagcaactcctttgtcaaatactttttttgagtcgactccagcatatactaatgctgctttaggtgcagcctcctttaatttttcaatattatcaacagaagccatacgtgctcctaggaaaaccacatcaggttgcatacgagcaatagcttcaaagtttggttcgaagagacttcctacgtcttggtatctcttagctttataaacagatttgacgttattgggcaataaacttagagcatttttagccttcgggataccaataacagatttttcagctcctaaagctgtgatagtatccaaagctcccatatcaaaaacaactacttttttgggttttaaaggaactttaagtgtctcgctgatttgctttttattatccggcttgtctcttttttcttttttaatatagaccgaatagttgttttttatggtaacagtttgtgatttttctttagctaaaacagcttgagaagtggttaagatagtgcatagtgctaatatagcaataataagtttttttgtcattaaataaaatctcctaaaatagataaaaactaaaaatgttatcctacataaatctctttatttacgttgtacaaaaaaggataattggtttaccatcaacagtttcgatacggataggcatatcaaataaatgagaaaggattttttcttgcataacatcttcgacagtcccacaagtcaccacttgtccttcttttaaagcgacaacattgtcagcgtagtgagttgcaaaattgatgtcgtgaataataatcactatagttttattaaactcatacgcatatcgtttgataagatccatcatttgaacagcatatttcatatctaaattgttgagtggctcatctaagcaaatatattgagtatcttgtgccattgtcattgcgataaaagctctttgaatttgacctccgctgaggttattaatgaactcgtcagctatatcgtttaaatccatataagatataactgattctatgacagctttatctttttgacttaaccgtcctttactataaggaaatctaccgaatcctatcaagtctctcacctttatcttgagtgttaagtgattagattgtcttaatatggctaatgttttggctaagtcatttgaactgtagtgggctaatggtactttatcaaggaaaatttcaccattatcataaggttcaagtcgactgatacaactcagcaatgtactctttccagatccatttggacctaaaatagctgttacttttcctttaggaatcgaaatattaatgtcttttaatatttccttttggccatagaacttatgtaaattgtttatttgaatcataagtttttccttcctttgattaaggtgaatataaaataacttcccccgataaggttgaggagaacacttagttgaacagtgaggtgtaatagattttgaacgagatgctgccctaagacaagtgtaaagatacagataacaatggctataggaactaatatttgatgtctaaaggtatgaaaactgtgataggtaatatgtgctacaagtaagcctaaaaaagtaatcggcccaactaatgctgttgctatagctaccatcaatgctaaccataaaaaaaatctagtagtaagcttttgatatgagatgccgagtgatatcgcattttctttacccaatagtaagacatccaattcctttataaaaggccaattaatgacaaagctaacgacaatgataatgaaagaaatccaaaggatcttggtgttaatagcattgaaactagcaaagagctgattttgtaaaatcataaaatcgttggggtccataatggcttgaataaaggatgagatagaagaaaataatgtattaaatatgagtccagctaatagaacaaaatacaaagactgttttttatttcgaaaaagtatcgtaaataataagtaagcaaatccaaccattaataataatgaaaggaggaagctactaaaagatgaaaattttatgacacgctgagctccgattaaatacattaatcctgtttggataaggatatataagctatctaaaccaataatggacggagttaaaagtcggttattggttagagtttgaaaaataagactagaactaccaatgcagataccaaccaaaattaatgcaatcagtttttgataacgtgtttttaggatatagataatcaaaaattcatttgcgtcagttggaataccataaattaaaaacaaaataatagcagcaattagtagtatcagtaaaataagtaattttggtatctctaaatccttaatcatgattttccctcatttcttataattgaaatcaggaaaaaggcactacctaatactcctagcgtaactcctattgagacttcataaggaaaaataactaagcgaccaaaaagatcacatatcatgacgatacaagcccctaaaagcgatgtctctaagatagttgaggacatatgatctcctttagttatgctaattagattaggtacgattaaacctaagaaaggtaaagctcctacgataataatgactagggatgtcataattgaaaccaaaactaaaccaaagtaaatcatcttttcataagcaacccctaaattcttagcgaagctttctccaagcccaacaatggtaaactgatgagcaaaaaaatatactaaaaacaaacatggcaatgctaagtaaagaatttcgtagcgatggctagtcatgatggaaaaattaccttgaagccaactgttgacagattgtagtacttgaaaatgtgttcctaaaaatactgttgctgctgctacaatttgtccaagcatcagtccgataagaggtataaaaatattatccttaaaagtaatcatttttaaaatggttacaaaaagaagcgatcctaaaatggcaaaacctgaagctatacatagttgaataaaaatagaggtatttttaaagaaaatcagcgtaacaactactcctaatttcgcccaatccatagtccctgaagttgtcggtgaaacgaacttgttttgggttagttgttgcatcagcaggccacagactgacaaacttgcaccagatattaggatactaatggttcttggtaagcgactcgttaaaaaaatatctacctgtgattgatcaaggtgtgttatttgctccagtgggatagatttcacaccaacaaatagggacgttagagaaagtataaccaaagtacaacccattacaggagtggttaatagctttttcataaaactccttaaaatgaaagataaagtgttcaaaaatgagcacaaaactataataacataattttttggaaaaatatctactttttaaagaattttatacttaagaaaacattattatatcaaggtttttctatttaaaatcattataaataagatagattaaattagcagaatatttactttacctatttttgaaattagaaaaaaaccttcgttataattaaaggtttttctaattttaagctaattttttgattatcttagcagggtttcctgctataacaacgttattttcaaatgatttcgtaacgacacttccagcgccaacgacgacattatctcctaatacaacacctggtaaaatagtcactcctccacctagccagacattattcccgatttggattggggcaccgtattctaatcctgaatttctttctattggatctagaggatggagtggggtgaggagttgacagtttgggccaaacatacagttatcgccaatacgaatttcacaaacatctaagaaagtttggttaaaattggcgtagaagttttcaccaacataaatattacaaccataatcgcagacaaaacgttgttccatatggatactcttcccagtagcaccaaaccatttttgtaaaatgacgttacgtttgctactattatcttcattgttaaaggcttgcatattttttagtgcaacttctctatccttgcgtagttcaggtgctgatggacgataatattgtcctgctaacattttttctttttcggtcatcttttcctcttccgtattatttacaacattgattttataggttcaaaacttttacgatgtatcggagtaataccgtatttttgcaaaccttctaaatgctctttagtaccatagccagcatttttagaaaatgcatatccaggatatgtgctatcataatcagacattattttatctctggtcactttagctacgattgaagctgctgcaatagagagtgaattagcatcacctttgataattttagtttgtggaattgatagatctaaaaccatagcatcaattaaaagatgttcaggagccacagataaatgagaaactgcatcaatcatagcatgttttgtagcttcataaatgttgatatcatcaatacattggctgtcttgaataccaataccaactgctaacgcttgatctaaaatattttgatagatttcttgatgctttttctttggaatttttttggagtcattgagatgttttattttacagtttggtggaagaataacagcagcagctactactggtcccgctaaaggacctctacctacttcatcgattcctgcaataaggtttatatgttcaatgtaaagttttttttcgtagaccaacatttgttctaagcgcgcttcttcgtctaaatctgactgaatatttttttttcgttgaaggattgctttttgaacacctgcgcgtgaatctgtttgatattcttgccaacgtttgtcttttaaatcaacaatagtctctaaaattgctttgatttctttaattgttgccatcatgttctccgacgatatctaacgtatagcgtcctaatttaccatcgcgaacttctttgacaaataaattataaaagcgatcgtaatcgtcacgataacctaatttttgtgttaaggccatgatgatttcaggagcttcatcctctaaattaatgcttttaaaacgctctttgagacgatcaggataataggttttaaagtaattcaatccaaatattgttacctcatccataggcaataattgatctttgattgcccctgttaatgctagctttaatccaactaattcatcttcaaatttgggccacaagataccaggagtgtccaaaatttccagttccttattagatttgagccattgctgaccttttgtgacacctggtttattaccaaccactgcaatttttttacctgctaggcgattcattagagtcgatttacctgcattcggaattccaataatcatcgtacgaagtgtctctttttgaataccacgtccccgtagattagcaattttatcggacattaatattttagcgatgtcggttacttttttaactgttgattgttctttagaattaatagctaatgtctttaaaccttgagattcataaaaatctctccattctttagttcgaataggatctgctagatcagctttattgaggatcattagtttgggtttgtctccgacgattttggttagcattggattttgactagaaagaggtaaccttgcatccactaaaattgtaacaaaatcaacatgcttaatattttcttgaacttgacggcgagctttggacatgtgtcctgggaaccattgaatagtagccatgaaataaattctccttatgtatagactaccttaaaagtctacatctatttgttagaggtctaattttttagttttattctttttcaaccgcatataaaggtcgataaaatattcgattaacactattattctatcatttttttaatgatatcgaaatactttatacatttattccgctgataggtttcgtttactaattgagtttaagggatatacgaaaaagctctggaagtttactccgagcttttaataacatgatttttaccacattaagactatttgatggtaacagtcgttccttgaggaatattttcatagaaccattttgcatccgcccttgacatacgcacacagccatgtgaggcggcttttcctaattgctttgcttcttctggaatctcatttccttgttgatcagtcggaacgctatgaaagagataaataccatgttctttaaaggagacccaataataggctccttcttttgatgaggcgttatagaaaaaatctcctcgttccggttctatgacaaaagttccttttggggtagggctctcttttgctcctgttgaaacaatcgttttaaagatgaccttgtcattcgaggttattgtcattgtttgcctcgtagatgaaacatgaatttctagatttgaatatttatttagatttggataagtcttcttttgtaagacctctttttttgaagtttgacttgtttgagatgcttgttttatgacacttgctttttctttggctttatcaccacgaaaaatagaatatacgctaaagatactcatgaaaacaaataagacagctaatattggcaaaattgaacgttttctcatgtactatcctctctcttttgctctgttatggacaaatctattataagtttctgaaagaaggttgtcaaatatttttgtaacatttgtaatcaaacagaaatatttactggaatttttagtagaaaaataacctcgaatgatacttcattcgaggttattgtgataactgtaagtcttaataacatggcttcaaaataatattaagaatctaaactactgtaataattaattggtctatgatcgttaaacaggaatgcttcaggatgaacagtttttaattgtttttgaccagatttccagaaaagtccaacaagaatacctgttaacactaaagcaagtgaataagttaagatgcctaagcccatattaaatccaattggttgagataaaatataaacaactactgcatacaacatgaacatagctggtacaaatgttacccaataatttcgtctttttaggatgagatatcttgtagcaactaataaaccaataacagcagttacttgatttgcccagttaaagtaacgccataggagattaaaatcaacgtgtgtaaggacaaatgaaataacatataatgggatagttacagcaaagatttttggaagagtatcttgtttgacatggatataatcagcaacgatagtacgtaagctacggaaagctgataaaccagatgaaacagggagaacaataacaccaatgatagcgatagttccaattacactaccgagtaacattaacattacttgattgacaactgcagaaggtgtcccagcagcaatcatttcatagagattttgacctttgaacaagctcattgaagcacctgcccaaatcatcgcaattactccttctgcaatcatcatgccgtagaaagtgaaacgcccttctctctcattaacagttgttcttgagaccataggtgcttgggtagcatggaaaccagagatggctccacatgaaatggtaaagaataaagcagggaatatcccaagcccagctggatgcatatttttaaaggtttcaaaagttaagtttggcatatcaaagccaccagttaataaacggaagccaactgctgccgtactaaccattaagatgacgcagaatacaggataaactttaccaagtgctttatcaataggtaagactgtagaaataaggtaataaacgaaaataagaccgattatccaaggtaaagatagtgtcccagctggtaaaatacttaggataagattagctggagttaccacaaatacggttgcaactaaaataagtaatagcattgaaaaaatgttgatcacatgcttcattgactttccaagatagcgactagctaattcaggaagatatgcaccattatttctaagagaaatcattccaatcatataatcatgaacagcccctgcaaaaatacatcctaagactatccagatataagcaactggaccatagagtgctcctaaaatagggccaaagataggtccggttcctgcgatgttcaataactcaatcatcccattcttccattttggcataggaacaaaatcatatccatcccttaatgcttctgcaggtgtttggcgattttcatcaatttgaaaattcttttcaatgtatctaccgtacgtgaaataaccaacaattaaaagggctacccctcctaaaaatgttaccatatcactgcctcctaaaaatttttttgcttaattttattaagcgttttcatgactttagtatagcattgaaaaattgaaatttcctattttcaagatgaatggttgttttttagaaatgaatagtctaagttttatgatgaataacttttcattagttaggtagatatgcctaacatttgttttaggggttttacatttgctctgctaacaggaactgttattttattacaaaggtgtaactgaagtgtttggttaaaccaaggttcaatcgttttaatagcattaatgttcacaatgtaagagcgatgtacccgtacaaattgagatgatggtagtttatcttgccattgttgtagagagccatcaatttcataatttttatcaggtgtttgtataatcagttttccttgcatagcttcaatcaaaaggatatcatccgccgacaccagatagattcgatcttctactgtcaatggatactgttgcttgaagagaggaccggaagttacgctctctataattgtagatgtacttagcgctccttttactctatccatagcttgctttagcctatcaaaatcatagggttttaacaaataatcacgcgcatcatgctcaaaagcctgaatagcatattgatcataagcagtcgcaaatatcaataatggtggtttgggcattttattgatatactctgctaattgcaacccagaatcatctctgagatggatatctaacagtgctacatcaaaagtttctctaagtaaaatagctaatgcagtagccatatcatgcgcctctgctataacgaggttagaatcatacttattaagaaggtaaattaattcgttacgtgcaactggttcatcatcaactactaaaactttcatacaatacctttctaatttttaatggggatattaacaatagcacaagttcctgaatcatttgattcaaattttaaacttgcttgtccatcataaataatattcaagcgacgaacgagattctcaatagctgtaccagaaccttgttttgaaatttgagttttttttccaagcgttattaatttttcttttggaatcccaataccattgtcttggacaatgatatgaagcctatcattatttcttgcaatagtaacctttagctggttatttttattaacatgcttaaaagcgtgtttataagagttttcaatcaagacctgcaatgtaaagggaggaatcattaagttgtcatctgaatttgtttggttgtctaaattaaaggccaccatgttgggaaatcttgcttcttcaagggctaaataggcgttaacctgttccaattcatcatgaagaggaattaaattttgctttgcccgttgaagattagcacgaataaccttgctaaaatcttggacgagctttcttgctttttcgctatccatgcgaattaaaccataaatagtattaagtgcattaaaaagaaaatgcggattaacctgcgcttggagagacttcatttccgcatcctgtagtaaccttgttgcttcctcagcttgtcccaaagctaactgagtggaaaagatattgcctaatccttcagctaattgacggtcaacgtaagtcatatgttgtgcgtctgaaaaatataatttcaaagtacccactataacatcgtggatgtgtaatggaataacaattgctgaactaagtgggcaattcttatggtcgcattcgatttcacttttatcagttgcgacactaactttaccagtatctattgctcttttagcaagctttgttaatatttgagtattaggaagatgatggtcagctccatctcctacataggctaaaatggctgattgactagtcaggctaacagcactcacatccatatgtttatgaataatttcagctactggttgacaagattctgttgtcagtccctttctaaggtaaggaagggttaaatttgctaattcaagtacttgatgggtttgaaatgctttagcatgttcttctaatttttgagtagatgaaataatggatataaatatacctaaacctaaagtattacttaaaatcattggcatgctgataaaagatactaagcgaagcgcctgattaaagtcaacactaaaaatgaggatacagatcatttgtagaatttccataccgaaaccaacaaccattgcatctaaaacacgaattttattataatttttacgaagataattgcctgataatccagagcataaaccaattagtaaggaagaaatgacataaatatgaggggctaatcctccttgcaaatacctaacgaatacagataagagaccaactataataccgactatggggccaccgattagacctgatacaccaatggttaaaacacgtgtattggcaaccgatgattgatctgctatatgattaagagtttgtggaatgatagataaatctgactgaatttctacccctgtaaaattagaaataatagcaaataagctaaataagataagcagaatatactggtgtttttttaattcgggttgcttcaaagtttgttttataaaggggatatgcacaaaggcataggctaataatatgattaaccccgctcgctccatcataattaaaaagagtgtcattaaatctctccaaagtattaattagtccgttataacataggtataaaatgattcatttcattactcatttaaaatgtctctctatcaagtattctcaagacaattaaggggatatccatcaacaactattatgaaaacaactacttaaggataatagatactttcactaaaaaattttgattaatcaaatatattattattatagcatatcaaatattattttttacatatttattaattaatatgtaacacccattatctgaagtgtgtaggtgaggtctaagtaaagaatttaagcgttttgataataaaaaagtgagaacaatagattctcactcacaattagcctggtaatttctcacacgatttggtactgctttttaaaattgggcgatggtgttatttttaatatgagtagctgcactcgaatccgattgctcaaaagcacttgccgctccattgagatagctattcagatcagaaataactggttgaatgttttggctgacttctttgataacttttgatccagcttctaagtattttcaatgttcttgaacccattggtgattttttttactaagtcacatgctgttaaaatcatcattaagcttatccctcccataataataatcaattttttaaatcctttaaacatcacttttcctcttatcttattgattttttcaattttattgctgtcttgacgttgctatcgcaaacaaccaactcaatgcaatatagttatggtatacatatcaatgtaagaatcaagatttttaaattcatattatttgtatgatattcaggattagctatttttgatttcacaaaaaaacttcttctactttttctagactgattctttcttcccactccttcgtatcaatagttaaacaaagtactttaaatcctacagagggtcattccatcaattaatggtatcatcgcgcttgaagcatggcataggttttggtattagaaactgaatatgaattctattatctgttaaaaaaatcaatatcaccagagtatttataaaacataacgataaaaaatcaaaaaatatttttactatttcccttaatttcatgagatttaatttccctttttgtgtattatttctattctacactagtcttacccttagaaatatttttccaattttcaatgacacgagctactctttcttgctcttcgtcatggtacctccaaaaattacttcatcaatatcttcctcattgaaataatatacttgttctaaattgagctctctggaaaaatcctgccagataatcaaaatatcatcttgatcaataatatttgctcatgaaatggctccacaaaatttcttacatctttaacattttcatagagtgcttttactccacaatggccaaagtacctataacaactgctactactggtacaaattggagctgttatgattactacaaaaacactctcagcaagcgtagagactattctacctacttcattttttctagatatttattgctcctaccttaaattaattaatttatcactcatattcgggatgcttatgaatataatatgctgcataaagggaatcgacaatcagagctggaaaagttgccgtaaataatacacctccaatcaaaccaaaaatattttcaatactacctacaagaaagactggagaaagcatcactaaaccaaaaataattccataattaatttttaattgttccttttttcctttttgtaatttccactgattaaatttccattttttcccctgattttttggtaaataatagaaataatatattccagaaaatacaataaaaataattaacattatcataatatacatttttgccatctcagtataataaattgattgaacatgtccaaaatttctattatttaaaaacattgccaagcctataaaatcaaaacctataataagtgttaggaatactaatgataataaaatataagaaattttttttaaaaaattagatatttttttaaaaaaaagcgaaataattattgagaccaaattaacaaaaatgcatacagaaaatatgaattttataaaacctaaaggatcaccaaaattacttgcatataaccctatgcaagatataaatagtccaatccatggaaaaattttaatatatgaatattctatttcaaactcaattaacggtccatgatatctatggttgctctgtttcaaaaattttaccctccaaataaatcttttaatccttttttagcaaaacctgtaattgattcattacccaactccttaactttaaaattcaaagcaaaatcaaatgccagccctgcactgctccaacaacggttcccacaggtcctcctaccaaagttcctattgctgcaccggacaatgcatctacacctgaatctatagcaaagtttttgattttttgatctagtgtagaagtcttatcatcaaaaaagtcttttttggcattagtttctatattgactattttcccagtccaacctaatactttaccagctttagcaattcttcctaattttccccatcctttaaaagcatttttgggatttaattcaaggacttcatttttaagggattttattgctgcattattcaaagtaactccttttgacgcaatttttctgagcttatttgaatcttctaaagcttttttctcaactgtttagcatcttcttctcgttttttcatacctgtttgaattgtttttgtccattctaatcccttacctgaggtatcaaatgtaccatttaaatttccaaaaccttctgagaatagttaaggcctgccgaaacgacatcctgaacttctgttagtccacaaaagactgttgaggattccgcattgaattccatgagatattttttaaatcataggttacctttaatgccagaaaactcctaagagatttcatgaactagctgtcactttataagtgatcacaagctaataacaaaagtgaaatgaatcattaacttttctaaagttaataaagaatggaattagctcaattgccactctagaagcgagaaagtcaccataagaatgacctgttgtgacagtaatattatcgccattactttgaacacgatcataaaagctagtagctttgtctcctaatcgttttaaataagcagagttattagcaccgatatttgcatctgaaataaagtcggttgccccatcagcatccttattagtacccgcataagctatataagtctcaccagtatttttatcttttacagcaatagctgcaataccagtctctttgtcatacataccgtcactataagttaaatcagttctatcaattagttgatttaactcttttttagtactttcacttgcttcttttatgtcatcaccattatttaaagcatctgtataagccctctcatatttgtatacataatctgataaatctgctgatgttttaacccgatgttctagttttatagttacattatcatttcccataacttctccgtttattttctaaaactataggtctcacccaaatagtatctcttgtttttagtttttatccttagtgtatagtcaaaattattttttccactttttgtaaaagtaatatctgcttccttaatatcagatattttaaatttatctctcattttttaataagcttcgactgtgtcggcaattcatatgttatatctttcaactcagtttccggatgttttaataaataactttttacttttaatttttttaattcttttaattctttagtatccattgctccgataataaagtcatcaaatgtaatattcggttttccttttggataaactatattatttttaaaatattcaaatgggacctctttattttctaactcattatagccacccggcttttctatttgactttttcttgtttcaaacttccctaaatccttatttttttttaaatcttgaatactatagaaatattctaaatctaatgcatcacctgaatccgatactaatagtaagtatttttgtattttgctcaaatctttatctttttgtgctaaaaactcaaaaaacggtttaaaattttgttcagcttggtactcttcctttgtgcggttttctgggatttttgaatccttacatgctgtcatcattatcattattaataagcctccaataagcagtaatagtttttgttttttcatatgctcaatgctccatttctatttcttgagtgattttaagcattctttcttgtcttctatcatgaatataaatcatatctggtttcaaataaggttcttttgaattatatgatttcggtaatactgactgatccataactctcattcctaagagaacatactgtgcctgtgttctaatagcttttggaacatctgagatattagtcataaggtatgatgctaaaccaccaaataagaaataaatatgatatttgtgagccgagtcaagtaagaataaaatctgttctctatccatatttgtttctgccacaaaactattcatatcaggaatagtaacaaaccatgattctattttaccagattcttctattaaatagatttctgaaacaatagcttctaaatgccctgctatttcacttcgattattgatatattcaatttgttgttctgtcaaatcatcataatcagaagcagtgtctaaaagataaacttactatctttaatcaatgaaacagatttaactaagaagcgcatcaagttagacaaattatctggattgtcagaagtaaaaagtaactgtttgaatttcgaaagtggaatgctacaattatcaacttcttttaagctaataccaagtgaaatctgattagtctcacttgcttttttaacatcctcatatgctttaaactcctcaaaggtaagtgtttctggaacaattggaatggctattggtctcggtccagtccatttggtgataaaaatctgttgattttaaagttcttatgaaagataaaagggtcttagattttgacaagctaagaaccttttgtttttcaaagaataattatctacttctccccaactacataagtcaattgtgctgcttctgctgcactgaaggtgcggtaggagatggtgccaagtcctaggacatttgattcggagatcgggatagatccgtcttccttaacgtcttcgacgatggccacgtggccgtaagttctatcagcaccagcttggccggggctaaatgagatggcgtagcctgtttttgcctcgtgtgtggtttgatagcccggcttatttttccaatcgccaccattacccataaatggtccaaactggtagccaagttctttggccccaagggtaagtgcctgccacatagttgcccgcttgattagctcttgaaacagagtaactcgttgggactgccatcatagcgacggacgacgtgttgagcagttcctttgaaatctcagaaattccgccatgcgcgtcaatccacttgtcaatgctctccataatggccgcacgacgtttaccagaaccgctagcatccgtgaagtaaaccccacctcgagccgctacattcaagttgccagttgacaagaattgtgctttttggtcttgaatggcaaagctggtgttttggttttggatgatggtttcctgcgtcattttaatgacagccttgtcatcactaaagttttgagcgttagttgtattgttgtcaactgccccaaaaccaaacatattagcacctggtgctgtggcaacgccttgtgtaccaagcgaactttctgcgatagcaatggcaatgattgcacgcgcatccagaccagatgatttctctcggtctaagattttttgaccgtcgatgcgactgctatcgtatgtgatacctgtcgactgtaagaatccatcaagctgtgcggcagtaatgccgtaacggtgagacaatagattgtgtgtataagcatcattgcctatccagtgtttgacataagctgcgctagccattgccgtaggtatggcaacatctggcaaatcaatgccactcgtaatggctggtgtcacaacttcagatttctgaggtgttgctgtcacttgaggttggcttggcaccactggtgttacagactgactaggagctggagtttcgggtttgcttgtatctgtttgcgtcccagcctgtgtttctcctttggaatcacttgttgaaggaactgtttatctggactagtcgtcggattagtttctgtttgtccctcaattacagtctcagtaggagctgttttgctatctgctggttgggcatggagatcagttgaaggcagacttgcctcaggtaccactgtcgtcgcttctgatgaaactgactcagaagcgcttgtcgcctcagctgatgaattttctccagctttttcaattgtttgatcagttacagtcgtagcttgcgtcaaaatagtttgtgcatcctgagcaaaaaccgtaacagccgataagtttgacgtggcaattgcacacaacaaacacaatgcaatatatttatcttttttcaaaacgtttttccttaatagtttatagagtgtttaaagaatttaatattaaaaattacttttcttttattcttcagatgactattttaaaacgtctactgaaaagtgagggtatttgatatcttttatttatttcaaaaatattttttgcatctcctcttcattttcatcatagtaaccttcaaacaagactttatctatatcttccaaattgaaaaaataagtttcatttccaactatactaattgggaaaatacatccagaataatcaaaatatcccaattgaccttcattgtcatataacggaaatcttgatgtaatcatgactttctgactatcattttttaattcaatgacacttcctagagtatgtattttatccattttttcttctatttttacaattaaaaattatattgcttttttatttcatttattgcattttttctttcaaaaaaatcaatattttctaataacaatcttgataatattagtaacataagtgctataggaaaaaatatcaatactgagtatttaaaatataacattattaggagtagggatataaataatgaaattactaataaaaataacagtttattcgacaattcttcagcagaaacaattatatttgctattttttctttgtcaaattccattttctcgtaactaatattatcgatatttctcttttgtttcgaaactatattgtttaatttgttaactactactagtgcaattacgataaacattattgcaagaattaaattcaactttaaattagctattgttctataccaattattaataggaatgagtatgagaacaagaaacgtaataatactagaatattttttaatattttctaaattttctttttgataattaggcgtttcaaaacttttaatgtaaaaaatttttgtatcaaaattataataataaccttgatttccgtcatgatatatttctgcatatgatttctctctatgtatcaaaataaattccttctcaatttatactacctgttgaatcatacattaattcaaaaaaatcactaacattgttaattgtatccttcgatgctctttttataatatgatttatttcatctttattatcataaacataatcgaacaccatcgatccacctacacctattactgctgtagcaccaaagtccacagcagaaccaacaacaggagcaggcggtgcaagtacacctgttgaaattaatagtccagctgttgcggtacccgcagccgttcctacaacttttgcagcactaccaattattacgggtgctcctgtcttcatagttgcatcttctacatcttctccaccttttacttgagctgctccaaagtcaattgcagccccaagtacaggcgctccatattttacaaattggctcgagcctctaatgaagttagcgtaagaaggatttacatcaatagccgagctgtgtcagtcaattttgatttagctacctctttaagtaaggcagccgatgcattacttaaaccactgataattgattcataggtatcttttttaatttctcctaatttatacgcttcattagccgcttttattaatttctttttatcaactgaaacattactttttttagtagtattttcaatttttgaagctttcttactttcttcagcctttttacttttcagttcttcagctttggcgtcttctcgctctttccaattcttcttaactgtctttgtccattccatctgtccggatgttggttttccaaaagctccggttttactattatatccagaaaatcctgttgaaacagccgctagtgcttggttaacagttgactgtgcattagaaatgtccgcaaatactgttgctgaatgggcgttaaattcattaaggttgtctaatttcttttgattagattttatacgtttttttaattttttaatattactttttgtagaacttatggcagatttggaaggttctggatcatcgttaagatgctctaaaagtgcttcagcaatctttaatgatgccctatcacttgctaattttgattctaaaacgacagagtctaaatcctcatcaccacaaattgagacatataaggtttgtaattctgtacatttctcactcaatgtttcagagaaaagaatcattccttgaagcatcggagttaacgttccagtagcatagctttttgcatttgaataagcagtcccttgaagagttgcagcctctgcaaaagatgatagttttgttattgcatcatttaaagccgatacacgactaaacatagaaatagctactgttgatgcttgagttcctacagaacttacactaacttttaccatttttaacctccttttctttcattacttttttgcatcaaactctgtttttcataatacaacttatctaatgcattttcataatccataatctctttagaaactaagtttatcctattgtcataggattcttctaaacttagtgtttcactatttaccgttagaataaagtcattattctcttctaattcttctgattctgttaaataggcatcaccgagttttaatgattctagtaactctatttgtaactccatgacgtcgtttttcaatttttgtaagagccttttactattctcagcattatcaagctttatttggaataactttaagtcaagttcaatatcttcgaatgttcgttcagtcataacatcacctattaaaacaaaccatatttaggcttaaaatccggatttgatataacagagctgtcattactaggcattgtatatttagtatttgccgcaatctcttagctaattttttggtcaatagcttcaaactcattcaccgtagaatgaatgagagctatgaactcatttattttttcagcaatttggctactactacttgcctctccatcgatgtaagttgaagcatcgctattaccactataatcactgtttgaatccttagttggagctcctactgctgtgattccactggctcctgattgtattgcagttgcacaggtggatgcgacggaggcatcactttgtatttttgccatttggtctcctttcttagtctatggtgagttttaatttttgataggtttttctatcgtgaatgtaggcttcgtctttgtttggacggatttccttactattatacactttttcaaggaaggtttgatccatgagcctcatgccagccagcacatactgggtcgttgtgcgaacgtatttaggcacagcatcgatcttagtcccaacatagttatagcttgatccaagaatcagatgtaaaccatagcgtggtccattgtcaagcaatgcctgaacctgttcaagcttcatattgctcttagccacaaagctttcaaaatctggaatcatgataaaccattcagctatctcagattggctttcacgttgctgcaactcatagatcaactgatccgccatatcttcaatcatatcagaacccacataagtacgtacctgaccttgatagctttcatattcgccaagcgaatcgatgatcatgttatggtaatttgggacgttaagcaagaccttgatgatatgggaaccaactgcttcgagtgactcgtcagaatcagacatgtaaagcatatgcttaaagcgattaagtgctaaactataactttcaacgtcaaccatttcaagcccaagtggtaaacgattagctgataggtcagcttgaacactatctgtagccataaagtcgtcaaaggttaattcttcgggaacaattggtattgcttttggtcttggtccagtccatttgctgttcatggcgtcagattcgttttggatgttattgatgatgtcaaaggtttcagtgccttctgttgagagagccacttgtaacacttcaatgtcatcacgtttgattaatccacgtcctggaatatcttccatgatgtgttggtgacgaccgacaagtgtccgtgattcagagtcatctgttaatttaagagcgatacgttctttaaggtttgccattaaggacgacctcaaagctgccgtacgaccagctgagataactaaggaaatgccaagtgacgacccatcacgcgaaatattttggaaacaagcttctaagttagtcggtgtttgagcttcccgtagcccttcataactgtcaataacaatcaggatttgaggcatggtttccccagatacctgacggtaaagttttgctgtcgcgacattgtagcgactgagggcttttttacgatcagacatttcaactttgatacgggcaataaacttggctattttttcgtcatcatcaatggtaaagaaatctgctacatgtggcaaacgtcttagaggtaagaggccattggtaccaaaatcaaagaggtaaaggtttaaaaattctggactattatgacgtgctaagtccattgttacagtttgaagggctgtggatttccccatacttggtcctgcaaaaattgacaaatgcccatcgtcttcaaaatcgtggtaagccacttcttgtgcttgttggcttggtatatccataaagccaagaacagctttgtaagatggggccttgctccagaggtctactgatccctccttacggagatcggttactgcaatctgattgcttagaggcggtagccacggttgaggtaagtctgagatgcccatttctttggttaaagcttgaatgttttcaacgatagcatctaattccgtaggtacttctttaatattttcggcttggtctaagcctgaaagatcatcatttaggatttcgtattggccaaggtcgttgatggaataaatggtatggtcttcaatcccttggtcgtctttttcaggttggtaatctgctcctgaccatgctgattggaagagttcatagacttcattattaccaacttggaggtaggcacgtcctgcttgtgtaatctcggcggcatctggagtatggagcatttccatggagtcgccgcggtctgctactttaagagctagtttgaagcgtgagtttgaccagatttggtcatctaccacaccagatggtttttgggtcgctaggattaagtgaatccctagggaacgcccaattcgcgctgttgagacaagctctttcataaactcaggttggttggatttcaattcggcaaactcatcggagattaagaagagatgaggcattggttctgaaacttctccaagtttgtatttcttctgatactggttaatatgattaacatcagctttagcaaataaacgttgacgacgtttcaattcagcattaatagaaaccaaagcacgcatcgattgggcaccatctaagttggtgatggtgccaagtaagtgtggcaggtccttaaagaggtttgccatccccccacctttgtagtctatgagaaggaaagctacatcgtgtggatggaaattaacagctaaagaaaggatataggactgtataatttctgacttccctgatcccgttgttcctgcaactaatccatgaggaccatgagctttttcatgtaggtttagataaacaatatcatcctgaccacgtaagccaagtggaacagctgagcttttatacggagcatggcttatccaacgctcttgaacatgcaaatcttcaaattcttctgcttgatacatttccataaaagtaactgcttctggtattgaagatttaagattttgtaggtgatttaacggagctaggcgacgtgaaatattttccttgtcataatcctctaagaaatgatctaattcaaaatctgtttctttaagctctccttcttctataactaactgaccagtattacggtctttaatattaataatggttttgatattttctgaaagtgaactcataacatcttgaacaaagatgagagaacatcccaattctgtaggatcttccgtaaagaattccatgatgacgtgatctaaaattaacttttcatcagttacaataacgacataatgcggagaaaataaagtcccttctttggcagatttatcttcgcgttgtgtgcgacgtaattttaaaatttggttaagactgttgagcacttgatcacggcttctttgattataaacaaagccacgaacattgacatcttgtaaggtttcatgtggcaaccaacgcatccaagaccacttatccatctcttcctctggaacaatagtaataaattgaacatcatggtaagaatggaaaaaagctaattgattaaccatcaattggagttgctccaatactaaacctcgtggtcctatatagccaactggtccatgtgataaattcgcaacaatcggcatatttttaatataacgattgttaaagtagaggttatagccttcgttctctaaaggatcttttttcccagaacgttctggttgagaataatgaatattatagctcgttggtacttctcccaaacctaggcgataatacaagaagtcaaaatgaagtggtgtcttttcataaatacgatggtgataagtatcagccatttcctgtaaaccttcaatcgttgggtaatgatagtgttgcccacgcttttgctctttagctaacttctgaagttcaattgacttatcagataaatagtcatgataggaatcaatgcgttcttgtaagtcctgcttatactgtttacgatttttaaagtaaccagtgatagagaaaatcatcgtcactagagccattgacattgttgcaatgatatagataccacgaggacgaaaaatagaaataagaatgctgactccaatcatcactagaggaggaacaattaattttaacagttcatctttagacttattaggttcattaccaggcgcattaactgtaattttatcttcactggaacgataaataatacgaggtgagcggtgaaaatcaggatagccttcgtaaaattgataagctgacataactttcttagttaatgatgtttcataatcagcccccccagatttgaatttcatctgggaaaagcttaacaattgttccttggaagctaatctcatcacctaaacttaaaggtaactgctgcactactttttgaagatgattattcagataaatatcaccttcaaataaattaagctgccaattactttctatttttttcagtaataaattaggggctccttctttaaaacggacacgatacccttctttatcaccgattaatatatcttcgtaatctaagggagtataaatttctttttgattattcgctaaatagaagacaattcctgaaatctctacaccattagttaactctttttctttttagtcaataatatataccaattgaccttgtatattttttagcgtgatgtcattttctaaatctgatactggtattggcgacttgccgtttgatgatattagaaaggatttctcctcttcaatattaaattcgtagcggagtgattgataataacaaataactaacatatccacctacctacttttagttttagaagatgtacttgctgtagtacttgatgattcagatgactctttgttggaatttgtcgaatgattattgctatttttcgatttggattcctcatctgttaaggctgtcttacggtctttccaatatttatcatagtctgtttgtagctcagaaagtttttgttcacgatctttaccagataaactattgtcttttctaacctgatccattttctgaacaatagcataaataacaaggtcagaatcgtctaaacgtttggcagcatcaatagcatcatcatctaaaccacggccaatattaatccaataatcaagatagagctcatcagtcttgagcgtaacattgtttaaaataacttcacgctgttcttcagaaaatgacattccattaatataggaataggccaactcgtacttctgtgtataaggtaacttacttacttttacatgttctagtcgattaatcacttgattataatcaactttaataaatgaagtatccgctgccaacattttttctttgaatggattgtgaataaaaaccagatatactagcggaatcaagagtattgtagataaagctcctagccaaacacttatgtatttataaagcttatattttgcccttgatacttttgctaacgtatgagtttctacttctacttgctgctcataatcaatagtaatgatgtctctaacagcctgaatagtttctgcatgataaatgctttttaggaaatctgatacttcaataacagaaatagcaccattatacaactctatatagtcatgttgcgtcaataatgcaaagacaaaacatttgaattgatataaaaactcttctggaccaaatttctcaggtctcataatcccaggaaggctacgataagctattttagcagttgcattttttgttaaaaatagattagagggatgcaaaatgaaatttactgacaaagacaaagccttatctaaatccaagacattcaaggctaatcgtaatttttcagataaagtttcttttttaaagctttcaaaaaatagagcgtgcgcttctgtctggaattgaaattgaatggtatctgcatcaattgcagttgtcataggcatcaacaaagaatggtgaatttctaacaattgcagttgttgcagattttgagttcctacttttgaacgcttaagagataactgccaaaaatctggtcctttttcaaattgaaagtcttgttcttcaaatacaaacgaatctgtttccattaataaaactcctctatccttatacgatcaccagttgttactggatggtgagctaatatatcgttctctcccaataaaatacctttatttataactcttagttgatatttggtacgcctttcagtacggctaaaaatactatctaattccattactaattgcttaacgctaattttcaaagggatacgtaaatcttttgaggtttcccccatatctagagtaatgttaatatgtgtattcatcctttttgtcctttattttaaaagtcattatagaagctaatattagtaccaaactaatgagaaccaggtatataattatatgaccaatatcagccgaaacagtcggttcttctgttcttgtaacaaatttaaattgattactttcttcagaaaataattgtttgatacgttttttcctatcagattgtcctttatttgaatattgaaacagttgcttagactgctttttctggagtgagactttagattgacggtttttatccaattttttaaggtcttcttttttaaataaatctttagttaattcagtttgaaaaccagaatttttttgtgaatctgattctaaacgttttgtatcaaaatgaatatcattattctttaacccatcagaaaatactgatgtttgactcatacaggataatattagtagacaggctaaaaatcgtttcaacttcatcaacaacctcactcttttactttagcttcaaaatttaaggtgataaaaatattcatgataataaaagcaacatccacaagaagtactaagataaggaaaataaatccagttgtcacattatcaaaataagatgataattgattttcaaggatagatagtggattaatagcttttagtaattttggaagtccactaacagtcgctactgtgcctacggcatttgatagatacacaaaactaataatcataaacaaagctaaacccataccaactgctttaaaatttttaataaagaaatactgactatgaattaataaaaaactaaacagagtcataactaggaaccaagatggtacatattcaggcatgacatgaagacttctgcttgagataactcccagtgctaaaccaataacaagagagaggcctgaaatgacaatgacatttaaaaagtctgtttgaagccagcggttgacattatacctatctgtcaatttcttaataaggttttgagtcgcaaagatatatgctgtaaataggctaacaacttctaataatagtatccaagtgaatgggcgataagtattttcagttgccctaactgcagacgctgattcagcgacaggtcgtgataagaaattaaggagaatatcatttggcactccatttttataagcagtattaaaaactttagagaaagaagctacgaaatcaccattattggccaattctttttggaagttagccattaaatcggttgcatccgtcgaaagtttgttgcccgaatttttagcatcttgaacatctttattgaatgatgtgaatatttgattaacttggtccgcctcttgactattagatttggacatatcttttacgcccgctgcagaggtcattagcccatctagctggttcttcaaatcagataattgttgatcagttgttttctgtgagtcgtttactttagattgatcctgtgtgatgttttggaccttcatgttaattgattgaagggtttcaagctgttttttgattgcatctgttagtcgtacatttgtctcagttacttttgccatttgatccgccaattcatcttgactattttcaacttcctccatgacatctttaactttctgttgcgcatcagcagtgttttcatccatcaaatacttagttataccatttttgaccagatcaaccatcgtatcgttaacactttgatttaaaaattgatcaaataaattttgcggttcttcgccatcagaaataatgtagtatttagctactaatccgtgagtggtgttatatgcatcatttacttcttgtagagttcgttgatacgttgcctctgcctcaaagtaagaccgttggattttaccgtcatcattttgtacaatttgtttctgattcccgatagtgattgtatagcttggtttcgtaatactagagttagatgattccctttgataactgctattgataataatattattgttttggctggggtccaaggttcttgtttgcttaccattaaccgtccaggtatctaccctgtaatctggattatttgattcaacagaaactatctgctcaccagttcgagtagaactagatgacaattttaattgattaactttatttttagcttcatctctatttttcctagcttcaaaaagacgattcaataaattagtatttaaatacagagttctttcgttgcttacttttttaatgatttccgaatcagaagatgtaaactgaatggctttttcttcttcttgggttaagtgcaactccgaaaggtttagtgaaggaatgcttgaaatgagagaatttgtgaaatctgctaccttagctttaaaatctttcaaagtcttctcattagtagaatgactcttcaataattctaataaagtaatattatctttattattcttagcaaagtaacttgctagtccctctctaacaattttatctagttgttcactttgatctttagcaatgttatcttgtgacttgagtgcttcagatagttcttggattttttgccttgcaacatttagataagctgatgagttttctttatgattatgattgttatcatcacccataatactattgagttgtgatgataatgtttcttggtctttttgtgcttgtgtgataatatcagataattgcttctctaataactcgttattcatttctagtaatgaggtcgaaaacgcttcatacgaaatgctatcttgatggcgctgttctattaagcttgataaatcttttccagtatttgtctgggttgtcaccaaatcattaaacatgttatcagaagcttctaaagattttttcagtgattcgttagcagtaatggaactactagactggttaacgagggctggaaagatattttggaaattagttgcagaatctaaaagatttttttggtaatttgagatattacctgactgaacatttaccatggcctgtacattttcttgagctgtatataagttacttaaaatacttgccatgtacatatttactaagtggctatttaactctgaaacaatatctttctctttttcagttgcctttttctctaatgctaaattccccttggcattaaccttataagagatagttgtttgctctgcatttgctttattgacatcaagaagtttttgagaaaagttattagggatgataaccattaattgataatcacctttgtctaatccattttgagcagtacctcgactaacaactgaccaattttgactattatcacgttcgatagacttaatataactagctcctaaattataactttctttaccattagatacattttgatcttcgttgactaatgctatatttagtttagtgttagtagctgactgtgttgttttattctcttttgcatgatcgccttgaagcttaagattaaggccagcaatagctactaaaaagagagcaacagctataatataccaaagtattctaaagttatttcttttcataattcttcctaaaatatattttattttcaacaaaataggaaggctttgccttcctattcacttatagactatgatacgatactatccactaatttgagaagcaatatctgcatccgtctgctcaatgatatctgcaacttttaataattgctggttaatatcttcgagtaattgagcaaattctgtaatttttggagataattcattgaattgtgcttcaaaagaatcaaaagtagatccatcccaattttcgtcaataactgcttgctcttgagtaagcaaattaagaacttctgttacttgttgagaaccagctgtgtacttttgtgctgatgagcgaagttcttctggtgttaatttaatttgtgccataaattttctcctttttctataaacacttttgcaacaactgcataattattacaacatattttttaaaatatattcaaatttactgcattatttaaaattatttttaatgttattgtttaatcctgtttattttcatctatatcaacaatctgtccttgttgatttaatcgaaatcgtgtcaattcgtgaaagaaaatctttttataaaaaccatgttgcttcttagcattgactcttttagaaatacctaatttatcatctgaactattaataccaaaattaccaatgtaatctttattaatacggtaactatgatacttctctggatgtgaaattacataggatgtggctgcttcagacatattgttaatgggactaggggaattaaaaacacgcgctgataatctcatttctgaagccacaatcatggccaaataaccacctagagaatggcctgttaaccagagggttgcatcaggatagttcatcttaattttttgtgcaaatagtttagatgttgtaatttgacttggatttttacaaggcagagaaatgccatcctctctcagggtaatacttgaaggacaagttagcaatttattgttcttccccaatacaactgaatcgatatctgttaagatatctttcttattaaaagcgttcgttcctgaatatgctataacaatatgattactttcatccaaagactgacatgccatagcctgcataccattattgatatcatcattaacctctaataccataaaagagcgtttttgatggaaatcaataatttgactaccttctataatttgaaggtgtccattactttctgctttggatttttcaatattatatgccatatctgatagcactttaaaactactatctggaatcattcattttcctctctattcaaagaccaggtgatatctaactcatcaatagactgaataggttcctttttttctctaggtctgagatgaaaacttttaggatgacaaataatacctgaaatactattactgtcactaatatcatcaacaatgtaattgataatattaacgccatttattgttataatagaagaccatgaaccagtttctaaagaatgcctccactttgaaaaaacaagttgttgaatacctagatatctgtgtactaaatcaagggcgatttttgtttctaattcattaatatgtgttcgtgtttttaacataattaactccttaagtttgttccctattttatcacaattaggctttttttataaaaacagaacaagctatatttaatctagtccgattctgttttgctggaagttaattttaccttgatcgtttgattaatctagtacttttaatgtaaatgctctgctttcaagaactttgaacattgcatgtgcagtatctaaagatgtaaatagaggaactccttgttcaattgcagaacgtctgatgatgagagcatcatggttatcaatgttattttgtccaactgtgttgataactgcttgaatcttaccatttttaattaaatcaggaatatgatttcgatcgttctctcctaacttacctactaaaactgtctctaaaccattagcatcaaaataaattgcagtcccttgggtagcataaatacgataaccaatactttgatagacttttgcaagttctaaagcttcttctttatctgtatcatctactgtaaaaacaatgttaccatagtctggcatatggagatatgctgcttcaaaggctttatacaaggctttctgaagattaatatctgatcccatcacttcgcctgttgatttcatttcaggacctaataaactatctactttagcaagtttggtaaaactaaagacaggggctttaatgtggaccatatctgaagctggatagagatcataaccatatgtaaaattgcagagtttatctcctaagataacttttgttgctacttgggccataggaatgtgagttacttttgataagaatggaagtgttctactagcacgaggattaacttcaataacatatactttctgatccttgattacaaactgaatattcatcataccgatacagtttaatccaattgctaagcgttttgtataatctacaatagtttcgataatggtctcagacaatgtttgaggaggatatacagccatggaatctcctgaatgaacaccagatcgctctatatgttccattattccaggaatcagtatattctgaccatcggatatagcatcaacctcacactctttacctataaggtatgcatctataagcactggatgatctgggcttgcctttaccgcggttgtcatataatgacgtaaatcttcttcgttttcaactatcttcatagctcgtccaccaagaacatatgatggtctaaccaacacgggataaccaatcttttgcgctgcattaactgcctcttcctccgtagtggcggtaaaacctggtggttgagggatatttagagcttgtaaagtggcttcaaattgttttctattttcagcacgatccaaatcttctaattgtgtgcctagtattttaacccctgccttgtttaaatcttttgctagattaatagcagtctgaccaccgaattgtaagatgaccccttcaggtttttctaagtcaataacattcataacatcttcaaaagtcaaaggttcaaagtaaagcttatctgaaatagagaaatccgttgagaccgtctctggattagagttcatgataatcgcttcaaaaccagactctctgatggctttaacagaatgaaccgttgcataatcaaattcaactccctgtccaattcggattgggcccgatcctaaaaccaaaatagaggctttatctgatatcaatgactcgttttctacggcataagtcgaataaaagtagggcgttgctgaatcaaactcagacgcacatgtatcaaccatcttataaactggaagaattcctgcttcttttcgcatgttacgaacttgatcttcgtttatttgccataaactcgctatagctttatctgaaaaacctttatttttaacctttttgagaatattgatatccagtctgtttttagataatagatcttctaactctacaatcactcttaacttatcaaggaagaaagaatcaatgctagtcaaacttgctaatttttcaatactataatgtctacgtaaagcttctgctagataaaataagcgatcatcttctgcctttcttattttttctaataaaacatcatctgatacattatctaaatctgctattttaatgtgatcgacacctatttctagtgaacgacaagctttcaacaaagattcttctatattccgtcctattgccatgacttcgcctgtagctttcatctgtgttcccaattttctatcgccactttcaaatttatcaaaaggaaatctcggcatttttgcgactacgtaatctaaagcaggttcaaacatagcgtaagtcgtttttgtaataggattaattacctcatctagtgtcaaaccaacagctatcttagctgctaatttagcaattggatatccagtagcttttgaagctaaagcagaagatcttgatactcttggattaacttcaatgacatagtatttaaaactattcggatcaagggctagttgaacattgcatcctccttcaattttcaaagctcttataatatctaaactcgcatctcgtaataactgattttccacatcagataacgtttgtgcgggtgcaaaaactatagagtcccctgtatggataccaacaggatcaaaattctccatattacaaacaacaagagcgttatctgctgcatcacgcataacttcgtattcaatctctttaaagccagcaattgaacgttcaataaggcactgtgtcacaggcgataactttaaccccttcgtcgtgatgtcaaccaattgttcttgattatcgcacatgcctccacctgtacctcctaaagtaaaggcaggacgaacaattaatggatacccgatttgctctgcaaattgaatagcttcttctaccgaattaacaatctcagattctggaataggttgattgagttcttccatcaactgtttaaataaatcacgatcttcagctttatcaatggctgataatttggtccctaatagttcaacattcaattcttctaggataccattttttgatagagccatagccatattcaatccagtttgacctccaagagttggaaggagagcatcaggtctttccttcctgagaattcttgtgacaaactccaaggtaataggttcaatataaactttatcagcaatatctttatctgtcatgatagtagctggattcgaattgaccaaaacaacttggtatccctcctcttttaaagagagacaggcttgtgtaccagaatagtcaaactctgctgcttgtccaatcacaatcgggccagaaccgataaccataattttacgtatgtctgtgcgctttggcatatcaaactcctctaattctatattttaaagctagcttttttgctggaaatcatcaatcatattaataaattcatcaaaaagataagatgtatcatgcggccctggtgctgcatctgggtgaaactgcactgaaaaggcaggatagtatttatgtcgaacaccttcgacagttttatcattaatctcttcatgtgtaatgaagagagcctcagggaaatcttctctcgagacagcataaccatgattttgacttgtaaaatcaacctgtcctgtttgcaaatgacgaacagcatgattaaaacctcgatgaccaaaagtcattttataagtctttgcaccattagctttagcaaatagttgatgtcccatacaaataccaaaaattggaattttaccttgaatttcttggatcatttgtaaagcattcggtaattgttctgggttcccagggccgttagataagagtactccatctggattgagatttaagatttcttgcgctgtcgtagtatgaggaacgactgtaatatgacattgacgttgtgacagttctcttagaatagaatgttttaaaccaaagtcaactaatacaatatttttgccaactccaggcgaagcataagctaatttggttgatacttgttcaatttgatcatttaaaagaacacttttttgaaggttttctagtgcttcatgaatagaatttccctcgtttattaaacaagctttcattgttccatgttttcgaataatttttgttaatgctcgagtatctatacctgaaattccaggtattccttttaattttaaaaattcatcaagtgtcatctgttgacgccagttacttggatactctgcccattcataaataactactcccttacatgttggtctaatagattcgtaatcgtctcgatttatcccataatttccaataagaggataagtaaaagtaataatttgaccgttgtaagattgatctgttatagattcttgataccctgtcattcctgtactaaaaacgatttcaccacttgtttctacatccgctccgaaagcctcaccctcaaacacactaccatcttccagtaataatagacgcttcattttatctcctttattatctgctattgagcactgcttctaagatagctatccttgcatagacgccattactcatctgtttcactattcgagccttatctgcttctaccaaatcgctagcaatctctacatccctattgacgggtgctgggtgcataataattgctgtatcccttaaatgtttatagcgttcttttgtaagaccaaattgttgatgatagctttcttttgaaaacacccctttaccatcatgacgttcgtgttgaacacgtaaaagcataaggacatcaatttgatcaactaactgatctattggtaaatattgcccatattcatcgaattgactactataccattctttgggtccagaaaagaaaatttcagctcctaatcgttttagcacttgcatgttagatttagctacccgtgagtgagttaaatctcctacaatcgcaatttttagccctttgaagtatccaaattcttcgtaaatagttaccaaatccaaaagtgattggcttggatgttggcctgagccatcacccccattgacaatagctgaatgaatgttcggactagcaatcaattctttataatagtcaatatcaggatgcctaatgacacaaacgtccaatcctagagcactcattgttaagatagtgtcataaagggtttctcctttattaacagaacttgtatcagcattaaattcaattgtttttaatcctaatttgagttctgccatttcaaatgacttatgtgttcttgttgaattctcaaaaaagagatttgacacatagtaatctttatcaaaaccaatgttgctaggattttctttaacttcgatacttctctttatcaaagacataacttcttgatttgataattcttctaaactgacaaaatgttctaatgaaagtgtttgtgtttgatgattcatgataatttctttctataaattttagctagaaaaaagcctcctaaaacaaggaggctctgcaaaatagtaagctagatagggaactaacttactatttgttaacgcaattccttgtttgcctctctggacaataccttaaaggatattaataagaaatgttttacctataccaatgtcgctgcgtggctatctttttgatagactatttcaccattgcaaattgtgtagtgaataactcccttcaatttatcaccgataaaaggagagttgctggatttggaggcaaattctgcctttattattctctcttcagcttgatcaaaaataacgatatctgcaggtccaccttctctgagataacctgcatcaaatccatataactgtgcaggattacatgtcatttttgccaaaaagtcaatcattgagagttctttagtagatactaaataagtaatccctaaggctaatgatgtctctaagccagtcataccagagggcgcttgactaatattatctgctgctttctccataatatgatggggagcgtggtcacttgcaataattgaaataacaccacttttaagtccatcaatgagggcttgtctatccttttcaagtcgcagtggtgggtttaattttgcattagcacccttagttaaaagtaagttctctgtctttgaaaaatgttggggggttacttctgctgttaagttagcaccaagcttctgcgcaaaatcaactacttctactgattctgaacttgacaaatgctggatatggactttcgcctgtgtttggtaagcaatcatagcatctcgcgcaatcattgaatattcagcaagaccactagctccacagacatgataaattttctgagcaatatgttcgttgataccaaggacaccatttaacgatggatcttcttcatgtaacgataggacaacatcatgttttctagctaagttcatagcttcttgcaaaaccttagtatctgtcaaaggaataccatcgtctgagaatccagcaactccagcctctaatagttcttcgaaattaactaaatctttaccattcagagatttagtaattgtagcaactgtttcaatcttaattgcttcttttgctgcactctccttaacttgttttacaatttctgggctagaaatcgttgggttagtattggccatcataagaactgtcgtaaaaccacctactgcagctgatagggcccctgtatggatattttctttatgtgtctgtccaggctcacgaaaatgtacatgaatatcgactaatcctggagctacaattttattgcttgcatcaatgattggaatgcctttaatatcaatttctttcgatatttgtttaatttttccttgatcaatcagcatgtctgatacttgattaaaaccactttgagggtcgataatcaatccgtttttaatgatatacatatctgtcctctctaactttgccaattcatttgatcttctttaaattttttcagtaataccagttggtcagctgtaatatatccattaactttagcaactttaattaattgattgtaatccgtcaaagtcaccaaaggaatatcagcttcacgaaatgcttgttcagccttagctaattgatatgtaaatatcgctactacccctaaaacctcaataccttgactctgcgcagccgtaacagcctctaaaacagatcctcctgttgaaatcaaatcttcaatgataaccattttttggcctgagtaaacacgtccctcgatttgattccccacaccatgatcctttgccttcgatcgtatataggcaaagggcaagttcatcttatcagctataatagcgccatgtggtatgcctgcagtcgctgtccctgctatgatatcaacgtttgggaaatgtttctgtatttgtttaacaaaaccattttcaatcagtgtccttgtctcaggatacgataaggttacacgattatcagtgtaaattggcgatttgacccccgaagcccaagtaaagggttgttggggtcttaagtaaacagcttgaatatctaatagttccatggcaatctgtcttgctaaatccatctcagtactcctttatttaatacgattccattcttcttttatctctagatatgcttgatatggattttctgctttcgttataggtcttcccacaacgatataatcagccccaactatacgtgcttgctcaggagtcatcgttcttttttgatcatctaactgattggtttgtggaggtctgataccaggcgttaagcaaatgaaatgttcgttagtctgtttcttgatttgcattccctcttgagccgatgcgactactccatctaagcctgcttcttgagctttttgagcataatggcaaaccgaatcaactacacttaagttaatatgttgatccacctgcatttgttcttgtgaagtcgaggttaattgtgtcactgctaatagtattggacccttccccaaaccttctctagctgctttcatcatttcgactcctcctgcagcatgcacattagtcatatcaatgcctaatttggctaagacagacatagatgatcgaactgtattagggatatcatgtaattttaaatccaaaaaaatgcgatgtcctaaggatttaatatatctaataattgagggaccttcggaataataaagctccattcctattttgacaaaaagcaattcttcttttggaaaatgttctaaaaaagttgttacagaagccaaatcagaaaaatctaaggcaatgatagggcatttttctaacatataattcctctctatagaaataataattgttggaaatgtaccagtatgacacaaaaaaccttgcctgagggcaaggtttcataaaaagttagcgaaaaagcactcgctatttgacttatgatggtgaccttgttcgcctctctggactcacttaaagatacatttgtaggtattctacaagtttacaatcattttgtcaaataaatactaaattattttatcattttacgtctaataaagaacgatagaggaatctgctgtacaatactgattgctatagcaattgtaaaagctgttacaaaacaggatctaaaatattccattgctacggcatctgctcccgtcaataaaaagtaaacagctctatagaagctaagtcctggaataagaggaaacatacttgtcgctaaaaagacagtggcaggacacttacgtttagcagctaatagccgtgaaaaataagtgatgaaaagccctggaaaaaatacggctatagcatccatgtgaaattgttgccataagatcaggtagagcatccaagatattgctcctagtatacctaagtcaaggaaataacgttttggaacatggtagagaatagagaaggctatcgtccctaaaccggccattagtgttctgatgataatctcaaggatggtattaggaacaccagaaaaagaacctgtcatttgttctgcaaacggaataatttcaattgtaatagccacacctgctgatatagaaatacaaatgagtaaagcagacataatcaaagctaaacctgttgaaaaattattctgtgaaaattctctcaccgaattaacaaaggcagcccctggcaccataaccattagtgcccctaatataataatgctacgatgctcacctaatcctgaaaaatataataaattagcacttaaagccactacagaactacctagaatggtcaaaagaaatcctgtatgtatacgactttccatcaaattcagaaaatatcctaaaattaagcctgttacagcagcggaaaatgaatctaataaggaactacctaaggctaaagaaaaactacccgctccacaaaaataagaaattaaagtaacaagtaaactataatctttttgatgttcaattaagtctaactgctttacaatttcttctggagatactaagtcttgtttagcaatttgcctagaaaggttattaacagcttcaagtctacctaaatttgctgttacaccatctgtattgcatactttagcttcttgtttaccatagcggttaatcccggaagcgataatactgctactaaccacataagcttcaaaattttctatctgaagagccttagcaaaatgcttcattgtgtcttcgacacgatagacttctgctccgctttcaatcagtaatttacctgctctaagaacaacgctcatatcattttgcatcttatttggccctgccttctactttattaccttagccacttaactaagttggttaaagtcccaaacatcatccatccatccttcataaaagtccggttcatgacataccatcaagattgatcccttataagcttttaaagcacgttttaactcatctttagcatctacatctaaatgattggttggttcgtcaagtacaaggacattattttcgcgattcattaataagcaaaatctgacctttgattgctccccaccagataacacctgaatctgactttcaatatgctttgaagttaaaccacaacgagcaagagctgccctaacctctgcttggttcaaagcaggaaaagcatcccatactgcttcgagtggagtttggcgatttcctccgggtacttcttgttcaaaataacctaaatcaataaaatcacctcgttcaacattaccagaaataggggggataatacctagtaaactcttaagtaatgttgtttttcctatcccatttgctccaacaatagctattttttgattacgttcaaatgttaggtttagaggttttgttaaagcacgatcatatccaatttgaagatctttagcttggaaaataaaacgtcctggtgtgcgagattctttaaattcgaaacttggctttggtttctctgcttgtaactcaataatatccattttgtctagtttcttttgacgagacattgccatattacgtgttgcgacgcgtgctttattacgattaacaaaatcttgtaaatcagctatttccttttgttgacgttcataggctgcttctaattgagcctttttcattgcatagactgattcaaaattagtataatcaccggaatatcttactaaatcttgattttcaacatgatagacaatattgataacatcgttcaaaaatggaatatcgtgtgagattaaaacaaaagcattttcataattttgtaaatagcgttttaaccaatcaatgtgttcagcatcaaggtagtttgtaggctcatcaagcaggaggatgtctggcttttctaataacagttttgctaaaagaacctttgtcctttgaccaccagataattcagtaacatcagaatccataccaaaatccataactcctaatgcccgtgcaacttcatcaattttagcatcaagtgtataaaaatcacgtgattctaaacgatcttgtagttctccaacttcttccataaggctatctacatctgcgccatcatctgccatggatatatatatatcattgatacgtgcctctgttttaaaaagttcatcaaatgctgttcgcaaaacatcacgaactgtttgaccttcttctaatacagtatgttgatcaaggtaaccagcagttacatattttgaccattcaatttttccttcatcaggttgaagatgacctgtgacaattgacatgaatgttgattttccttcaccattagcaccaataagtcctatatgttcaccttttaaaaggcgaaaagaaacattctcaaaaatagcacgatcaccaaaaccgtgacttaagttttttacttctaaaatactcatttaaaatcctttgattgataatagaggttattaaaaaactcatagagacactctacaagtttttaaattagtacattacatagtaagttccatatacaagtatagagagtttaaacttaaaagtcaaaccttacttaattttttcaaagtgtaaatgaacagtgatttgatcatcatagccatttcgctctaaatcacgttgcaaacggtatgaaatatagtgttcagcagtatgaatgtatcctgcatccaataaacgattttcaaccaaagactgaatcatattgatcgttggtcgttcaacctgagcatcctctaaatctaagattacttttttagtcacttgagcaaggtcttgacgaagtgactcatcaagcacataaactgtttgagcagctttcaagatagcttggtagattttttcaggatcaaattcaacaatctgtccatcacgtttgatgatttgcataagagcccctccttaatgtggaaacaatgttaaaacgatttgcaatcattttcatttgttaatttcattatgcaaatgttttcataatttgtcaagtgttttacctgatattgacgaaaaatcaatatcactagcagtcagcataagtattaagcaatgtcatattcttctatattaattcaaattttaactcttttgctggtttaaccagcccattcttatgcaatgtttctgcaatttgaacagaattccaagctgcccccttcagtagattatctgaaactacccacatatgaacaccattttcttgatcaaggtcttttcgaatacgaccaacaaaggtctccctatggcctacagcattaatcgcttgagggtaaatttgctgagatggaaggtcttgtaggacggcaccaggaaaatttgcaatagcctttttaatttcagagattgaggctaattctttcgtctcaatataaatggactcagaatgccccgataaaacgggaatacggacgcaggtagctgaaaccttaatagtagcatcttccataattttctttgtctccaaagtcattttcatttcttcgtacgtataatcattatcagtaaaaatatcaatttgaggtaatgcattgaatgcgataggataatgtttttgatcgctagaacatggcaagactgttgcaattaattgatcaggtgaaaggttatcatttaaaacttgtctcaactgttccttagtttcttcaacagcacgtgcacctgaacccgaaacagcttgataggtggaaactataacacgctctatcccccatttttgacgaatgggctctaaagcaatcatcatttgaatagtagaacaattggggcaagctatgataccattatgaccaatcatggcatgagcatttacttcaggaacaactagtggaacatcaggattctgacgaaaatatgacgtgttatctactacaactgctccagactttactgcataaggagcgaactttgctgaaatagatccaccagctgaaaacaaggcaatatcaacatcgtaaaatgattcttttgttgtctcttcaacacgtatagcctcatctttaaaatgtaaaattttacctgctgagcgacttgatgataaaagtttcacttgttctattggtaaattcgattgttctaattgacgaatcatttgtgttcctacggcacctgtagcacctacgatagcaacggtatatcccatataatgacctctatttggttgatgttgttcatcaatattttcaaaacattttaatgtgactattatactacatttttataaactttcaagaatagccaaatgaaaaaagtcaccctaaccaacctaattataaaaaggaatctcgtatccgattcctttttattgattgcatatatcattatatatagttactaaatgattgattatacttaattttcattgcgtctcaaaccgcagcgacttgttaacaaaattaaaccaaaacctacaagtttaaaaatgacattttgatcatcacctgttttaggtaatttatttatcactgaaattgttctagaattattagttaacatcggtctattagctacattagtaacctgagatacttttttagagaatgactgtttgttagagtcaccttgactagagtgattattttctctagatataattgactttgaaagaagtggatttttccctataagttgacctacttggctcttgttctcaacatcgcgttgacgacgctctaaaacattgccctgactttgatttccaagttctaaaacctattttattgaacaattaattttctccttactttttttaaattttaaaagtcattttattattacttttatttagattatatattaaaacattttataagttatgtcaagataatttattatttagttgcaatttattattaatttgtatgtttaaaattaaatagttgatatctaaaacatgatatttttaaattttcctttaatattataaagcatgatagatagtcatactaacattaagatttacaatgaggtaatagtatatttttaatacttcatctaaaccatcagaaactagattatttaaaaattttacaaagaatgtgatggtagcatattcaattaaagttaagtaaagacataattttaagaaggaaattgtgacttatttatgcaaaaaagaaagaaccaaactggttctttcttttttgcttttcagctacttaccacaatttgtaagaaattacaagtagtagtaagctaagggcaccttttcaagtgtgacaagaaggttcacacaacttatcaagatccgctcctgcgtttataatctccctgcgcaatagtggtaaaaccacatatcgactcatcgcataacagtagtttaacataatttagttaaaatgcaacctttactttttaaatataactagattcttcagtttacttttaatattaaattaaaaataaattatttctaaagcaggggagcaatagtttttgtcactatgccaattactttttggaattttggaatattatttatatctttcaagctaactaaccttgatttatttaatgtatccatataatctcgataaatgtcttggattgcatctaccttataaagataaacagcacattcaaaatggtgatacaggctacggtaatcaagatttatcgtacctacaacagcctttgtattatcactaaggaatatttttgaatgaacaaatccaagggtgtattcatatattttaacacctgattttgttaaagcttgatagtaagttttagcaagagcataagggattggcttatctgggatacccggcataataatacgtacatctacaccacgttccgcagcaaactgaatggcatgttccaattcactgtctaatattaaataaggtgtcatgatgtaaacatattctctagcatgattaagaatatctatataaacattttcccctactttatcagtgtctaaaggagaatctccataaggaataacatagccttcattttcaactaaatcatcgtgtacaccgaggtaaggcgctactaacattttttcctcagtaatggaccacatctgtaagaaaagtaggaggaaactatccactgctttcccctttaacataatacctgaatctttccaatgcccaaataactcaatgtgattaatatactcatcggctaagtttacaccaccagtcatgcctactactccatcaataacaacaatttttcgatggtcacgatagttataataagttgaaataaaaggagaaatcggagaaaatgcttttgcttttattcctattttctcaagtcgtttcgtataatcaaaggataattttgtaatttctatcataccatcatataagatacggacttcaacaccttcttccaccttttgttctaaaatactaagtatttctccccacattattccttcgtcaatgataaagaattctaaaaagatatactttttagcttttagtagttcttctttcattttttcaaagaatgcttctcccgttggtagaaatgtcacatcagtatttcgataaactgggaaatttccatgtgctttttcaaaatattgaaccaaatgatatgttgtggatgtacttgacttaagctgattcaaagtttcaggatcatcctctagataaatctgactctcatcaatcaatgtctccaatctttgtttcaaaccacgataaccccagtcaaatttggtgtacattaggaacatcgcccctagtaaaggggcaatcattaccaatattaaccaagttactcgggacaaagcatccatttcactattaactaaatataagaccgctccaattgttaagatatgctcaacggttgctaaccaaacacgatactgctctagccatgagtaagaggctagtaaaaacaataattgtaaaatcaataaaatagcgataacggttgttcgactaaatataccccttagtaaacttttcttactcttattaagtaaacgaacaattttgactttattactgataagtttttcccccctccaaatcaatcattttattatagcatactgtcacttgaatagcattctattattctaaattatctctagttaaaatctaatccccaataaaaagaggctagcatcacaagccctacctctttattatttaaaataatccaatggctgtaccgtcttctaaaacatccatattgagagctgcaggttttttaggtaaaccaggcattgtcaatacgtctccagtaagagcaactataaaaccagctcctgtttttggaacaaattcacgaacagttatatcaaagtcagttggagcaccaagtaaatttggattatcagaaaagctatattgtgtctttgccatacaaataggcatcttgtcccagccattgtcactaaactcttttaattgtatttgtgccttaggtccaaaatgaactttattaccaccatatattttagtaacaatttttttaattttttcttcaatagtgtcttcatcattatataagcgtttgtaattggatgattgtgtttcaatcacattagcaacagtctgtgcaagttcaagaccaccgtctgctccatcttcccacacacttgctaattcaactgccacatcaatattactacataaggttttaagagttgcaatttcactttctgtatctgcagtaaactgattgatagctacaactaccggaacaccatattgacgcatattgttaacgtgacgctcgagatttgtaaaacctcttttaactgcttcgacgttctcttgtgagagatcttcttttgaaacacctccatgcattttcaatgcacgcaatgtagcaacaataacaatcgcatcgggagaagtcggaaggtttggcgtttttatatcaagaaacttttcagcgcccaagtctgctccaaaacccgcttcagtaacaacgtaatctgctaagcgtagagctgttgaagtcgctaagacagaattacatccatgtgcaatattagcaaatggtcccccatggacaagagccggtgtcccataaatggtttgaaccaaattaggtttgatagtatcttttaggataagtgtgagagctccttcaatcttcaaatctttaacatagattggtttacggttccttgagtaagccacaacaatatttgacaggcgtttctttaaatctgataggtcagtagctaaacatagaatagccattatttcagaagcaacagtaatatcaaagccatcttcacgtggtatcccattgacagggcttcctaagccaacgatcacctgacgaagagcacgatcattaagatcaactacacgcttccaaatcactcgacgttggtcaatatctaattcattgccttgatgaatatgattatcaagtagagctgataaagcattattagcagttgtgattgcgtgcatatcaccagtaaaatgcaaattaatatcttccattggtagtacttgtgcgtatccacctccagcagctcctcctttaatacccattacaggacctaaagaaggttcgcgaagagcaatcatcgtttttttaccaattttatttaaagcatcagctaatccaatgctcatagtggattttccctcacctgctggtgtcggattaatagcagttactaaaattaactttcctactttttgagattttacagcttcaatcttatcaaaagataattttgctttgtatttaccatacaattctatatcatcaaaaccaattcctacttgctcaacaatctcagcaataggctttagggcgacgctttgcgctatttcaatatctgttttcatgatattctccttctaaataataaaaatagtatagcaatattccctataaaaacatatttttttgcaaaaaaaatttaaaatgttcgttttatgaaaataaaactgcttttatttcttctggactagtctgaccaaaataatcttctaatgataaagtacttaatttttccaagactaattcttctttcataggacaaccaatgagaaggttttcaatatctgaaatatctttagaactgaaaaagtcaccataaatacggcaattcgtaataatacctttctcaatttctaagtgaaaatcgtaagttcctgacggaaaacgagcatctctgtgatacgaatactgtggtgagttaccataattccaatcccaattcttatatttttcatcagctagagcgtcaatcgcagcccaatctttttcggttagatgatagcgttttgcctgatcaatatgatcaatatgtaataattgacaaaccattaaatctttaaattgatcggttgtgatatgacgataatcttctgacaagtggctacgaatatctcctactcgacttcggacagattttatccctttagattcaatttttttccgattaggatttaacactttttccatagcatcaaaatcaacatctaataaaagagagtaaccaccgtaaatacgaccgtttactatcgtcattgctgcacctgatacttttttaccatcaataactaagtcatttcgttccctcatttcaacactagaggcacctaaagtttttagggccttaatagctggctcataagctcgtttgaaatcaccaaattgtccatgatctttcatgagatagcaaatatttacagcacctgagtcaacgtaaacagcccctccaccagtatctcgacgaacaacaggaatatcatgttctttcaaatattcttgatttgtctctataactgcattctgaaattttccgatttcaactttgggatcacaatagtatggaaataaaatatcatcatctaaaaaaacattttgtaaaatataaacttgcatggcaagtgcaatcgcaccgtctgtgatacgcttaccatttctaattggttcaataagatacatttaggtctccttttatagcaatttagttatccaataatttcttttttcgcttcagcaattaattcagcgatatgctgtgtcagttgcacactccttgagcgaatcttttgaggaatgcgataatgcttgtgattaagagtaacaaataaagagttttcatttaaagagacgaatcgccaaaacggatgcttaataaattgtggcgtggtatgtccaactccaatctctagataaagaactttgtcattttgatgttgtgataagaaattttcataacgttgtcgttgagcatgaaagtcagcatcttccaccatacctttttcttcgttacgtttattaatttcaaacggttgatcacactttgggcatttggggattaagttactaggaatcttcatatccttttgttgtgcaatcatttgacgaattgcctgatcatttcgataagtttgttgatgacaatgttgactacactgccataagccatattcaccttgaatatgaaaaactttttctaaattataatcagccacagcgaaggcattatcagcattagttgtaataatatgatattcttttttcgctaaaatatcctttaaatcaagataagcttgtcctaccggttgatctaaataattaagtgccacaaaacgactttggaaggcccaatattcttcccaatcttcaaagtcataaagacttgcttgcaacatatctaatagttgatatttagcaataaaatccggaaaagcttcttcaaatctggggccaatataggtgaatccatccgctgcagacatgcctgcaccaataccaactacaatagcatctgattcttctattaactgacttagtatttctgattgagaatgattagttttttctagagtcttccacactgtcatctatttcctcttttaataataatttttgataaatatcttggtctttaggtgtgaatgtattgaaaataatatagagtttgtgctgattttcgcgttgccactctaatatcgcttgaactgccaattcagcggctctttgattaggaaaaccaaattctcccgttgatatacaagggaagacaattgttttaagattagctcgaactgccaattgtaagcaagatttataagaagactttaataaatcctctcttatacgagatggcttttgatcaacttttacataaggtccgactgtatgaataacatacttacaaggaagatgataggattcggtaagtttagcttgtcctacagcttccattcgtccttgttgtgtcatcaattgatgacatgctaaacgtaatcgtgaacctgcaaacgtatgaatctgattgtcaatacaatggtggttaggaataaaacaacctaacaatttactatttgctgcattaacaatagcatccacttgtaataagcaaatatccccatggtaggtaaatacatttgaatataccgtttgatgacagacgtctatcgtttttactttttgagtattccaccaatgtgacaaatacctatcttctaaagacaggtactcttgactaatgttttgaggatcttgttgattaactagaccacgccaaaccgtttgcaaatcggtggtcctcaagtcatcaacgtctgttaatttttctgactgaagatactcaatcatggctagcaatagttgtttttgattaggcattttctaaagcttcaaaagcagcataatcaacttctgttaacacaaccaaccaattttcgtcagctttttcagaatttaacaaagttggttcttgacttgcagctgtattaactttaacaactttacctgtaagaggagataaaattgccataaccgtctttgaagcttcaatatttaaaataacatcatcaacttctaaatttgcatcatctgtgaattccacatatccaacagttcccaagtcatcttgaagttcgggagttaagctgatagtataaagttcttcatttttttcaattaataagtagttcgcaatttttttcatgagtattttcctttctgagaaaacgtgattaatataactgtgataataattttaaggatttgattcgttggtcaagtcctggaacaagaggaatcaaaagtagttcttctgcttgactagcattaactaaagcgtcaagactttctttaacttgttttggatcacctacaatcatacggtcgcgatttgatttaatttttgctttttgttcaggagtcaattggtaatgattagcttcttcaatagtaggaaatgttgcaaattcattgaagtctttatttcctagcatccagatatctaaagtctttgctatgttttcagcttcttctgaagtatcagctataactacaaatgcagctaccatcaaattaggagacttattaggataatattcttcaaactgatgataataaagagatgaaagctttttagcttctgtcaatgggtctttgtccataaaaggaaaaacaccgaaggtaaagcctaagccaagtttagccgctaaataagctgatttttgaccactccccaacacatataagtctgggaagctagaaagagtcggttgaactaatggttccttactggatgattcatcaataagccatgacttcaattcctccagtacctcttcgtaatcatgtgctttatgtaagctacgaagtgcatttgaaactttaactgtccctagtgaatttcctaaaccaatacttactcgattcggatgacatgtctctaatgtcttgagagtctccgcgagtttaaaactactatagtgcagaggcattatacctccagagccaattttgatagatttagtctggttagccaaatgcattatcattaattctggattgctaatactgaatgccttaacaccgtgatgttcagccacccaaaattgatgatagcctagtcgctccgcctcttgtgataaaagaatcgtttcttgtattgcatcacttgcagtttttccataatcaataagcccataatcaaggacacttaatttcatctttcctccctataattgcttcgaagttctctaaaaacttctcgagcttcctttggtaaagattctccataatccatcaaaggaacaatatctttaaaggaggcttttggaatcgccaaaccttctaaatcactcactttaatccttaaattaatctgatcagaacacttagcttttattttttgtaaaaattccggatcaactactaagggcgtggaagctcctatcatatgagcatgttgtaaggcttcaaacacctttgaagcactattaatacctccagttgccataattggaactctatcaccaaaatgttcaaatataacttgattaaccagctgccctttgtaaactccctcagaacgtatagtatttctaaagacatcatgcccccagcttgcaatggcaagataatctacctgagcaatcgctaaaattttttcaagaaattccataaactcttcaatgctatatccaatttgtgaaccgcgagtttcttcaggcgtcgctctaaaaccaaggataaaatctgactccgcttcttctctgataactttttgtaccgctttaaaaacttctaagcctaaacgacagcgattagtcaaagtttgaggaccatattcatcttttctttgatttgagaaggttgagaaaaaagtttgaattagtaatcgttgtgcagaagatatttcaacaccatcaaatccagcttgtatagctcgtcttgtagcctggacatattcatcaataatccttagtatatctttgtgtgttagttctttaacctgatgtgggtatggcgattgcaattgcatagggctgggaccatatacatatccgtgtcttgccaaagtgtgacttgagaaacgtccagcatgcgtcagctgcaaaacagctttcgctcccttagacttcattgctttagccaatttagtcaaaccaggaatgtcctcatcctttgaaacgctaaaaccatattcaaataactgaccatattctgtgatatatgctgctccagtaatttgtaatggagcggatttagcacgacgaacagcatatgctatgtcgtcatcagttacaaaaccttctgatgtagaagaattagttaccataggtgatagaacaaaacgattttctaagctcaatccattgggaagtgttaatggacgaaataaattaccttggacattattcatctctgctcaccatccccttattagccatagacttagcctgaaatctattaaactctgcaactaaatcgggtctaatcatcagtaaacgatcattaaaacctacttgtttaaggctaatcaacatacgatcaataacatcttctactgtcataggacaatctaatagatcagatagattagccataatttcaggatctacatttggataagcaattggactacccgtatcacctagaccaatcttataaaaatctgaaatcatttgactccgccctttttgatcgccacaaacgctaaggtaaattgataccgcaataccattctttatacggcgctgagccaagccagcaaattttttgccatttatactaagatcaaacttaccaggacaataggaggtctctacttcaaagtgctcaataggttgataaaaatctgaaaatatacttctaataaaatcgaccattataagatacccatctgagatagacaattttctctcaaaaacatctggaataaccaatgaaaaatttaaaattccttcatcagctacaactgcgagaccaccaaaattccgaacaactggttcatagccacgactgatgatttcttttttagctaattctaaatgtggtaattctcgatctaacatccccagaatgactgtcttagtcatcggccaaatatgcaaaataatttcttgatttgagcgattaatctcccttaaaaatacttctgtccatataaaaggtttttccgcgtcttgagcatctgtaacatagtctttaaaaatagatacaggtaactgcgctagatcttgccattccaataaatctgacatcctttctctagaaaactctgcaagatttattttatcgcaatcgcttgaaattttccagtaagtttccctcaaattccattactatcaagaagaaatatatcttttatttacgaaaagcatttttttatgtacaatatggctatgaaaattttgattacatcaggtggaactaccgagaaaattgataccgttaggagtatcacgaatcacgcaacaggaactttaggaaaaataattgcagaaaaatatttacgagaaggacatcaggtgacactcgtgactactaaaaatgcagtcaaaccagaatctgctaccaacttatccacatttgagattgaggacgttgactcattaataaaaaccttgaagccattagtgaaagagcatgatattttaattcatagcatggcagtgtctgactatacccccgtctacatggctgatttcgaaaaggttaaatcaagcgatcatttagatacttttttgcgcaaagataaccacgaagggaaaatatcatctgaatcagaatatcaagtcctttttctcaaaaaaacaccaaaagttatcagccttgtgaaaaaatggaatcctcaaattactctagtaggttttaaactacttgtgaacgttactaaagaaaatctttttaaagttgctcgtcatagcttaatcaaaaataaagctacgtttattttagctaatgacctcattgatattacctcaaaacatcacatagcctacctacttgaccatgataatgtgtataaagctaccaccaaagaagatattgctcaattaatttacgaaaaggtaaaaaaatatgattaaacgtattacactagccgtcaccggttcaatttcggcctataaagcagcagaccttacaagtcaattaactaaaattggctatgatgttcatatcataatgacacaagctgccacagaatttattacaccgttaactctgcaagtattatcaaaaaatcctattcatttagatgttatggatgagcataacccaaaaatcatcaaccatatcgaattagcaaaacgcacagatttatttatcgttgcacctgcctctgctaatactattgctcatctagcatatggcttcgctgataacatcgtaacaagcgttgctcttgctatgcccgatgaaactccaaaacttatcgcaccagcaatgaatacaaagatgtatcataatacaatcacccaacgtaacattgatattttgaaaaaaataggttatcaggaaattgaacctcgtattagtttgcttgcctgtggtgataccggtcaaggagccctggctgatatctctactatacttaaatgtatacaagaagttgcaaattaggctgtaaatttgtatactatttctagtttaatttaaggagttataatgaaaaagaaaaacaaatcctctaacattgctataattgcaatcttttttgctattatgcttgtcattcattttttgtcatcatttatttttagtttttggttagtccctattaaacctactttgatgcatatcccagttattattgcatctatagcctatggacctcgtattggtgcaactctaggcgccttaatgggggggatcagcgtagctaacagcagcattgttctattaccaacgagttacctcttctcaccttttgttgaaaatggtaatttttattcgctaattattgcacttgtaccacgtattctaatcgggattattccttatttcgtttacaaattactacacaaccgctttggtttggctatctcaggtgctataggctctctaacaaacacagtatttgttttatctggaatttttatctttttttcaagtacttataatgggaatatcaagctaatgctcgctgggattatttcatctaattcattagctgagatggtcattgcagctatcattgtatatctaactgttcctcgtattctcaatattaaacattaaaaactggccaggaagaaatcttcctggcttttcttacttatattttatagtcatattgaaaaaaacatgttataatgaaagcgtttataaatattgaaggagtatttcaatgacttacacagaaaatcttcaaaaatggttagattttgagcagcttcctgactatcttcgtcaagaattactatcaatggatgaaaaaacaaaagaagatgctttttacacaaacttagaatttggtactgctggtatgcgtggttatattggtgctggtacaaatcgtattaatatttatgttgtccgtcaagcaaccgaaggattggcaaaattaatcgaaactaagggagaggaagctaaaaaacgtggtgtagccattgcctatgattcacgccacttctctccagaatttgcttttgagtctgcacaggtcttggcacagcatggaattaaatcttacgtatttgaagctcttcgtccaacaccagaactctcttttgctgttcgccatttaaatgcctatgctggtattatggttactgcaagccacaatccagcacctttcaatggttataaagtctatggacaagacggaggtcaactaccaccagctgatgctgatgcactaacagactttatccgtgctattgaaaatccatttgcagttgaacttgctgatttagatgaaagcaaatcatcgggccttattcaggttatcggtgaagatgttgatattgaatatcttagagaggttaaagatgttaatatcaatcaagatttaatcaataactttggaaaagacatgaaaattgtctatactcctctccacggaactggtgagatgttgacacgccgtgcccttgctcaagccggttttgaatctgttgttgtagtagaatcacaagctaaggcagatccagacttttctactgtcaaatctcctaaccctgaaagccaagctgcctttgctcttgctgaagaactcggacgagaagttgatgcagatgtcttagtagctactgatcctgatgcagaccgcctaggcgttgaaattcgccaaccagatggttcttataaaaacctttctggaaatcaaattggagcgattattgcgaaatacatcctggaagctcataaaacagcaggaacacttccagaaaatgctgctctcgctaaatcaatcgtatcaacagaattagtaacaaaaattgccgaaagttacggcgctacaatgtttaacgttttaactggatttaaattcatcgctgagaaaattcaagagtttgaagaaaaacataaccacacctatatgtttggttttgaagaaagcttcggatatcttattaaaccatttgtccgtgataaagacgctattcaagcagttcttttggttgctgagatcgcagcttattaccgttcgcgtggtttaacacttgcagatggtattgatgaaatttacaaagaatatggttattttgctgaaaaaacgatttcagtaacactttcaggtgtggatggagctgctgaaattaagaagattatggacaaattccgtgaaaatggtccaaaacaatttaacaatactgacattgtattattagaagatttccaaaaacaaaccgctactaaaaatgatggaacaatatctaacttaacaactcctccaagtaatgttttgaagtacacgttagctgatgattcatggattgcagttcgcccttcaggaactgaaccaaaaatcaagttctatattgccacggtcggtaatgatttagcagatgcagaaacaaaaatcgccaatattgaaaaagagattacaacatttgtaaattaataaaaaaagctaggaactgaactgcaccccaaaagttagacaaaaaatctaacgattggggtgcttttctgatgaaattaagttatgaagataaactagaaatatacgagttaagaaagatcgggatgtcctggtctcagattagtcaacgatatgatgttcgtatctcgaatcttaaatacatgataaaactcatggatcggtatggtgtagaaatcgtcgaaaaaggtagaaatgagtattatccacctgaattaaagcaggaaatgatagataaagtcttgattcatggttgttctcaactctctgtttctcttgattatgctctctctaattgttctatactcacaaattggctttcccaatttaagaaaaatggttatactattgttgagaaaacaagagggagaccgagtaaaatgggacgtaagcgtaagaaaacttgggaagaaatgacagagctcgagcgacttcaggaagaaaatgagcgcttgagaacggagaatgcctttctaaaaaagttgagggatttgcgcttgagggacgaagccttacagagcgaacggcagaaacaattagagaaatggtcacaggaggattccgactagacctcttacttgagataactaagatagctcgtgcaacttactattatcaactaaagaaactgaataaaccagataaagacaaagcaatcaaatctgacattcaatccatttatgatgaacatagaggaaactatggctatcgtcggatttatttagaactgcgaaatcgtggctttgtcatcaaccacaaaagggtgcaaggcttgatgaaaagtatgggcttgactgctcgtattcgtcgtaagcgcaagtatgcctcttacaaaggtgaggttggtaagaaggctgataacctgattcaacgccagtttgaggggtcgaagccctatgagaagtgctataccgatgtgacggagtttgctttacctgaagggaaactttatctatcgcctgttcttgatggctataacagtgagataattgattttaccctgtctcggtctcctgacttgaaacaggttcaaaccatgcttgagagggcttttcctgcggcttcatacagcgaaactattctccacagcgaccaaggctggcagtaccagcacaagtcctaccatcaatttctggaggacaaaggcattcgtccttctatgtcacggaaggggaacagtcctgacaacggtatgatggaatctttctttgggattctaaagtctgagatgttctatggcttggagaagtcttataaatcacttgatgaccttgagcaagctatcacagattacattttttactacaacaacaagcgaatcaaagcaaaactaaaaggacttagtcctgtgcaatacagaactaaatccttcacttaaaataaattgtccaacttttgggggtcagtacaaacttactcctagctttttttatatctatctaacgatattctattattttcaatcatgaaatataactgcaattaacttcacgatcaaataatagagcagacttacaattaaccacgttatcccaataactgcaactaaacctattaaaacagataataccgtattcttagttgctagttggttactgataaaccatgaaactgcagaaataaatatcagtaataatagttgaagcctttttttcatataattcctcttactacttttgtgcattttgcatttgataataaatacctttttgagccattaattcagagtggttacccacttctacaatttcaccagataccataactaaaataatatctgccgtttgaatggtagataagcgatgtgcaataataaagcttgttctccccttcatcaacatttggaatgcttcttgaacaagaacttcagtacgagtatctatagacgatgtcgcctcatctaatatcaatattctaggtaatttaagaaaaatacgagcaattgtcaatagctgacattgcccctgtgataacgaatctccagcatcttctaaatacgtatcatatccattcggtaattgtttgataaagaaatctgcattagctgcttttgcagcctctatcacttcttcacggctagctttaggattggcatatgcaatgttatcgtgaatcgtagcactttttaaccacgtttcttgtaataccattccaatttcttgccttaattgtgatggctcataatcagtaataggcttacaatctaaaaggatatttcccccgtcaacttcatagaaacgcattattaaattgattaaagtagacttcccagcacctgttggtcctacaatagcgaccttagctcctgctggaatgtgtaaattaataccattcaatagtagttttgatttattataaccaaaaacaacgtttttaaaatcgatttgacctttgaccgttgatgaatcaagtttttctgtacctgttatatttggtgacgattcttctaaaatagagtaaaggcgttctgcacacgccagagcactttgcatctcagacaggacggaagagatgtcattaaatggcttagtatattgattgacataatttaagaaagtgattaattgaccaacactaaaagcccctgacataatgcgaagggcaccaatcccagctaagaagccataaatcaaactattgataaatcgggttgatggattgacagttgaagaataaaaaattgctgattgagaaaagttagcatactcttgattaatagtcctaaaatgatcactactttcttcttgcgcactgaatgcttgaataaggctttcttgactcaccatctcttcaatgaattgagtttgtcgtcctcgtgatgccgtttgattttgatataagtgataactctttttagcaataaagcgggctagaaagagtgataaaggcgtcagaaataataccaaaaaaagcattaataaatcaatctttgccatactaaaaatagtaactataatagttaataaaccaacaaagaactggttaaaaaccattaataaaccatttgataattgctccgtatcggtagtcacacgactaatcaagtcacctatgccacgtttatcaaggtaagctataggcaatagattcaacttttccattacagcctttcttaaagaagcaacataatgaaaaattaagcggttatagagcagaggattaatccattgaataatagtatttgctaaaatgactgcaatcatcttccacattataggtaacaataatatcatagaatgaggcgataatacaacgtctaccgcttgtccaattagaacaggcaaataaacagtgaggcaaacttgtacaaccgtccctaataatgccattcctactaagctttttttagaaagaagatcttgaacaagctttttttgtatctttttaggatgacttgctttcatttactcctcctccttaaaattttgtgaatggtaaatggacttataaactttgttatgagctaataaagattgatgattatcaaaaccaacttgtttgcccttatcaaggagtaagattctatctgcattttgtatactattaattctctgtgatacaataataagattagtttggttgaaatgtttagttatagctttaaataaacgagcttctgttaaataatccaatgcagatgttgcatcgtctaaaatcaaaaatggtatcttatcttgaactaaagctcttgcaatcgtcaacctttgcctttgaccaccagagaaattcctaccaaaactctctacaggggcgtcaagttgaccatctttttcttttacaaaatcactagcttgtgctatttctaaagcagtccaaagtttttcctcactaactttaccaagtcccaaagaaaggttagaacgaatagttcctttaaacaactgagcattttgaggaacaactcttaccagggtacgccaatttgaaattgtatctggactttttccctgatgatatatatcaatatccccttcttgcactttataaatatgaagcaataaattaatcaaggttgatttcccagagccagtcccaccaattatccctaaagtttctcctacattcatagaaaaagtaatatcagataaagctttttcagaggagtttggataagaaaatgccatttcttgcacttctaaagccttattcgaatattttggctcaagtttgtcatcaattatttcagacggtctttcaaaaacggctataattcgcttagcactgatataactttggttcagtgatgtcaccaacattgtcatttttaacaattcaacaagaatttgcaataagtaattaattaaagcaaccaacattccttgtgataaaagatgattagctatatttaaattaccacgccaaataatcacaaccaaagtgatattaacaactagaaatgttagaggcgttactaaactagaaagcctacctgcttttaattgtaaattcgtataatgataattgatatcattaaatgcttcactctctctatctacttgattaaaggcacggataactcgtacaccttgaagttgttgcctagtcaactttaccaaataatcggttgaagttctgattttaaggtaaataggatttaatagtcgagacattacaaaaacaatgataaataacgtgacaaccattaccaagaaccaaatagtcaatgaggggctaatggaaaaagccataattatggcaccaaaaacaataatcggagccctcaaaaataaacgtaaaaattgatttaaaccagtttggatttgaaatgtatcagcagtcaaacgagtaatcaaactagcagttcccaattcatctctgtcttttttacccagtgacatgactttttggtagagatcctctgtcaattgtctcgtataaccaactgcggcttttgaagaataatattgagcagttatcgctactacaacacccaccgcagccaaaaagaaaatcaatccaatttgcaacagtaaaccacttctatcccctcgtggaatggtctcgtcaatcatttttgcaataacgattggtaccaaaagttcaaaagaggcttctaataatttgaaaaggggtccaaagatagtttctttgatataccccttaaaataataagttagtcttttcatacttacccttcttaaaacaactccattatttttatcaaataaaggttgaattgaacttcacgtgagtagtaaatattaccaccatttttatagagcttccctcctgaaattaaggcgagaggatgatagtaaaagtaagtgtccccgttataatttcctaggctgggagctacaacatttttagagtaatttttggccaactcaatggaattttcacccccatgatccgctacataatcaatataagaagaaccaaaattgtatgcttggacagcagtccatacatcaaccttagcttttttagcttgacttatattttgtgacaacagagtgacgccatgtttaatactggtgtggctatccgtaatactgttcgtagttccactgatactttcacttgattgcatcacatctatagcatctcccttagtttcagtataaatcatagataatactaagtgcacattagcctctgaaccattctctgcaagagtattctgcactaaatcatgatattgaagcacttttttaacattttcatggatgataactagacggtacccaatgaaaataataataattaatgctatcaaacgttttaaaaatttaaacatattatttattttgaatatcctgtatgtttttgattagtattgagtatgtaccatcagggttttggataaattcaactgattcggcatcttggtagacattgttgggtacaatcaattcaataccatttgaaagagatagcttctgattctctaacttcttaatttgacgggaatgatcaatatcacttacttgaacaggtccaggtattgcgtctttcaattcatcaacaaaagtcagcctggctgttaaattatcatcaaataattgatctgctaatttttctggagacaattcttgctcttcttctaaattcttataaatagccgatttcatttttgattggaaagaaaaatcatctttgttgaaattttcagcaattttttgagctgtctgttcaaccatttttatagattttttaacagactgttctggttgtacttgtaataaattttcagaaaaataattagcaaatgaaccattgtgtttgatacgcttttcaattaaatagtattgctttgatgacttgttaacaaccaaagcttcatctggagtttgagcagcacttggaaggttattctgtgttattgtaattggctgctcttgattttcagaaacatgagcaaattgttcctttaatgagattcgaaggaaagcaaaatgttccattccatccttgtcaaattgaataaaaactaagtcattcgttttttgatcttccgatatgacaaactcttctttccaaagttgcgcaatttgacaggaagaaacatataaatcatcttgtaaatgactcataaatacattatcctctccaaaatagccacgcttagcttcatcagaaaaaactttacttaattttttacgaaagtagtcatcaatccttggagttagggttagcggagtatctgatagcactaactctgtgtcgttaggagaaaactgatgtataataatctgtttgatataaaaatccatcataacattaattctcatacaaagggaaagcgtccgttaatgatttaatttcttgacgaacttctgtgaggacatcttgattttcatgatttttgagtgccttaatcattaattcagcgattcttcgagattcttcaactcccattcctcgactagtaattgctggagtaccaattcgaatacctgatgttttaaatggtgatagtcgctcaaacggtatagagttcttgttaagggtgatattgacttcttcaagaacattttgtgcctttttgccattctcaataacttttgtgacgtctactaagaacaaatgattatcagtaccatcagaaatcaaatgaaagtcatcatcttctttaaaaactttagccatggcttgagcatttttaataatatcctcaccgtatattttaaaggaaggatctagggcttctttcaaagctacagcttttgcagcaattacatgttctaatggtccaccttggagtcctggaaagactgcagaattaatttttttagcaattgcttcatcattggttaaaatcaaaccacctctaggtccacgtagagtcttatgtgttgtcgttgtcgttacatgagcataaggaataggactagggtgatgaccagaagcaactaaacctgcaatgtgagccatatcaaccattaagtaagcatctactgcgtctgctatttgacgaaatttttcaaaatcaataatgcgagaataagccgacgcccctgcaacaattaatttaggctgcgtttcctgtgctattttcaaaatgttatcatagtctagcatctccgtcttaggatcaacagagtaagaaacaaaatgataagtttttcctgagaagctaactgaagcgccatgtgttaagtgcccacctgctgctaagtccatccctaagacagtatctcccggctcgattaaagccatgtaagctgctgcattagcctgactaccagaatgtggttgaacattagcaaactcagcattaaataacgtcttagctcgttctatagctaaactttcaactacatcaacacaatctgttcctccataataacgatgactaggatacccttcggcatatttatttgtcaaaacagaaccttgtgctgccataacagcttttgaaacaacgttttctgatgcaattaattcaatattattttgttggcgaatttcctcatcatgaatagcctgccaaagttcttggtcaaattctttaaaattgtctttatcaaaaatcattttttactccttaagctcgttataacttttaaataatggtttcaatcattatatttatcacatttttactattagttgcaagatgattaaattaattttcaaaaattaattcaggtatcgtagccgttagtacctcttgcgtgattgcaccttgccttaaaatcttaactctatcaccagacaaatcaataatagtagaatccacacctgtcaatgctttatcatcttcaatacctaaaacttgatgattaaactgtttttgaatttctgagaacacacgaccactatcacatccagaaatattagcagaaggaccaatcagtggaccatggttagcaatcatatcaagggttacagggtgtttaggcatccgaaatcctacgcttaataacccagaattgatccaatgcggaacttcttgtgaagcttccaaaataatggttagcggtcctggtaaaaaagcatcgtacaattgctttaaataggtcggttgatttttagaatattttaaaatagtctcaaaatcacatatatttaagttcatagccttatcacgaggcctttttttaagctcatagacgtggttcacagcttcttcactcaaagctttggcaaaaattccgtagactgtttctgttggcataataactgcgccatgatcctctaaaatctgtcccaaatcattcattatctaataccaccattctatctttaccaaatatatctttcaaaactctgcaacgattgtttggaaaatatcttttcaataaacttcgtaaatcatcaccttgtttgtaacctatttcaaaatataatttacctctaggttgcaaatattctcttgagttttcaatgattttacgataaatagctaatccttcttcgtctgcaaaaagggcactatgaggctctgaagctagcacattcttccccacctcgtctttgtcattgtaagaaatatagggaggattagacacaataatatcaaatttacctgaaatgttactaaagacatctgattctataaaagtcacttccgcatcacaattattagcattttcctttgccaagtctaatgcagatacagaaatgtcactagctagaacatcccaagaggggcgttctttttttagagaaatggcaattgctccactacctgtaccaatatctaaaacagaacaatcttctactttattctctgataagattagatcaaccaactcctctgtttcaggcctcggaattaaaactcgttcatcaacaaagaaaataaggtctctaaagtaagctttacctgtaatatactgcggtgatctatgttttttaagctgttgaaaaatattttccattaattgctgatcagtatcactcacactactattttgatttaaaaggtaatcagttgttgaccattgttttaggtcttttaatacataaataaaattttcgacttcttcaccacaagcttctaataactgtccgtaatgcttgattaactgcgcataattcattatttatttaaggcttctaacttttgagtctgatcatacataacgagtgcatcaataacttcatccatttttccagataaaatagtatctaatttttgaagtgtcaaaccaatacgatgatctgttacacgattttgtgggaaattataagtacgaatacgttctgaacgatcaccagtaccaactgttgatttacgttcagcatcttgttcatcttgagcaatttgcgcaaaatggtcagcaacacgagcacgaatgatcttcatcgctttatcacggtttttttgctgagtacgttcttcttgcatttcaactttgattcctgtaggaatgtgtaccatacgaactgcagtagcaactttattgacgttctgaccaccagcaccagacgcgtggtaaatatcgacgcgaaggtctttttgatcaatttcgtattctacttcttcaacttctggcattaccaaaacagttgcagttgaagtatgaacacgaccctgactctctgtcaccgggacacgttgaacacgatgagctcctgattcatatttaagcttagaataaactgactgaccagaaaccatagcaaccacttctttaataccaccaacaccattaacggatgattccataacttcaaaacgccatccttgagtttcagcatatttttgatacattgttaaaagatcaccagcaaaaagcgctgcttcatcgccaccagcagcaccacgaatttctaaaataatgtttttatcatcgttaggatctttaggtaatagaaggatttttaatctttcttcatactcttctttagctgcttttgattctttaagttcttctttagccatttcttccaattcagcatcaccagaagcatctttgatcatttcttcagcatctgaaatattttgaatgacttgcttatattctctataagctgtgacagtttctcgagtactagcttcttcacgtgataattccataaatcgctttgtatctgaaacaacatctggatcactaagtaactcacctaactcttcataacgatcttcaactgcctgcaattgatcataaatattcatttttctttgtatctcctttaaaaccgattaccttttaaatatctggattaaaataatgttttcgacaaactgggatatatgtttcattaccaccaatttgtatctgatcaccttcatagacaggttttccgttttctgtccttaaaaccatggttgctttcttactacagtattggcaaattgttttgatttcatcaatcttatcggccaataatagcaaatgttttgaaccttcaaaaagattgttttggaaatcatttttcaaaccaaaagccatgactggtacatctaagtcatctactactctagctaaatcgtagacgtttttcttactcaaaaattgacattcatcaattaaaacacaataaggcttttgtggtaaattctgaatataggagaaaatgtccatatcatctgaaattggaactgcttcacgacgcattccaatacgacttgaaacgactccaaattcatctcgagtgtccaaggcgcttgtcataataaccacaggttttccttgttcttcatagttatgagcaacttttaaaatttcaatggttttaccagaattcattgtcccatatttataatagagttgagccaaagcggaaaatcctactttctatagtattctacctattttaccacaaaggctgaagttttcccagccattgaaaacagtgtgtactttttcacaacattatgttacaatgatgcccaataacataaaggagtaacattatgccatttgtaaaaattgacttgtttgagggacgctcacaagaacaaaaaaatgaattagctcgcgaggttactgaagtagtatcacgcattgcaaaagcacctaaagaaaatatccatgtttttatcaacgatatgcctgaaggaacctactatcctcaaggtgaacttaagaaaaaataagaaatagtaaaagaggttacccaggtaacctcttttgatagtctttgtaagcatatttcttgacaaattgaaaatatttgaaaataagtgttgattttcaagttagaaaacggtatcattagaatatattgctttggaggtggaaaatttgcaactttctcatagtttaagactcatgggaacgactatcgatattcaaattaattctaaaaatgctcaaaaacaaatccgagaggtcatagaactcttggagctctacaaaaatcgctttagtgcaaatgactttaattcagagttaatggctataaataacaacgctggtatcaagcctattcaagtacatccagacctctttgaattaatcacaattgggaaagaacacagcttagctaggcctagtaacctaaatattgctattggtcctttagtgcaaacttggagaattggattttcagatgctaaactacctagccctagtgaaatatcagaagctatgattttatctgacccaactcatatacttctagattcaaataaacaatctgtttttttaaatcagataggaatgaaaattgatttgggtgcacttgcaaaaggatatatcgctgacaaaattatgacctatctcaaaaatgagatgattgattctgctattattaatttaggcggaaacgttttagttcacggagataatcctaatcgttcagaagggtattgggttatcggcattcaacatccgaaaaagaaacggggaaaaaatattggaactgtcaaaattaaaaaccaatctgttgtaacctcaggtacttatgaacgccgtctgattattgacgataaggaataccatcatatttttgatcgacagactggttatccgatacaaacagagatggctagcatttctattgtttctaaacaatccgtcgactgtgaaatctggaccacaaggttgttcggcttatccattaaagaggctcttgatattttaaacgctgtttcctacattgaaggcattatcatcactaaagatgatcgtatctatttatctgatggcttaaaacatcattttcaactattttatcattaagaaagaggatttctaatatgaaacttattggaatcgttggaactaactcaaataaatcaacaaatcgtcaattattacaatacatgcaacaacactttgctgacaaagcagaaattgaactcatcgaagttaaagaccttccgttatttaataaacctgctgataaaaatgttccccaagtaattttggatattgctgctaaaattgaagaaactgatggtgttattattggtacgccagaatatgatcattctataccttcggccttaatgagtgttttagcttggctatcatatggtatttacccacttctcaacaaacccgttatgattactggtgcttcatatggaacacttggatcatcacgtgcacaattacaattacgtcaaatacttaacgctcctgaactaaaagcaagtgttttacctgacgaattcttgttatcacactctctccaagcctttgataaagatggcaacctacacgatatcgaaacaagtcagaagctagatgctatctttgatgattttcgtctttttgttaagattactggtaaattatcaaatgctcgtgatttacttcaaaaagaagcagaaaattttgactgggaaagtttataagagtatagaagggaataactaagatgaaatttgtaggtattgttggctcaaatgcagagcaatcatataatcgtatgttgcttgaatttattcgcaagaattttaaaaccaaatttgaattggaagtccttgaaatcgatgatattccaatgtttaatcaagaccaaaattgggaagaaagtttccaacttcgtcttcttaataataagattacacgagctgatggcgttattattgctactcctgaacataatcatactattacagccgctcttaaaagtgtgcttgagtggctctcatttgctgtgcatccactcgaaaataaacctgttatgattgtcggtgcttcatattatgatcaaggcacatcacgtgctcaaatacaccttcgtaaaatccttgatgctcctggcgttaatgcttacacacttccaggaaatgaattcttattaggaaaagctaaagaagcctttgacgataatggaaacattatcaatcctgggactgttcaatttttagaaacttgtcttgataattttatcaaatatgtaggagttgtatcatcattgagaaaacctaaagctattgaatctgaagacctctactgtcagggacaaattgatacaaccattactggtatcgacccagatgatcctgattggttagacaaggcagctgagaaagttaacgccgttgaaggggatgcttacgttaaactagacaatggtttacttactgttaaccaacttaatatgtttttaaatgctatgccatttgagctaacatatgcagatgataataatcaatttctatattacaataataatcatccagatccagatacaatgttaggaaaacgtgttcgtgaacaagtaggaaaccgtatggctacagttcatggtagtttaccaccggcacgaatgaaaaatgttgaatgggttatcggtactcttcgtaatggaaatcaagaatatgtacgtacagtcgttcctggtacacctccagaagttatcaatactcacaactatcaagctatgtactacccagacggatcttatgctggtattaatgaaattatctttaactttaaaccgtggttagattggtacctccaaactactggacaacgtttggtcggtggaactactgctgctcctggagcttcagcagttgacgctacttctagcgcttcaactagcacaggggatgctcccgtggatcaagccacagatgccacttctggtgcctctgaacattaatctcctcgcttttgaggatctgataccttaaaaagatatcaagatcctcctttttaatatttaatcaagttaataaaatcacataaaaggaatatactatgtcactttttcaagaaaaaattgcttacaattgcgctaaaaaggaagcgctttataaagagagtttaggacgctacgccttgaggtcaatgctagctggggcttatttaacaatgagtactgctgctggtatcgtcgcagctgatactattggtaaaatctctcctgctctatcaggttttgtatttgctttcatctttagttttggacttatttatgttttaatatttaatggtgaattggcgacatctaatatgctttatctcactgcaggagcctataataaaaatatctcttggaaaaaagccatgacaattttaatttattgtacttttttcaacctcgttggtgcttgtatattagcttggttgtttaatcaatcgtactcattccagcatttaacaaatgatagctttttagggcatgtcgttgctaaaaagttaggaaaacctagttcaggagctttcctagaaggtattattgctaatatgtttgtgaatttagctatccttgcttacatgttattaaaagaagaatcggcaaaaatgacggttattttatctgctatttttatgtttgtttttctatcaaacgaacacttaattgctaattttgcatcctttatgttagctgcttttagccatatcgaacatattaaaggttttactcttctaaacattatccgccaatggacacttgtattctttggtaactggataggagggggcgttttcatcggcctagcctatgcttggttaaataaaacaaaaacttctcaccatgaataaaagaaaaactgagtaataaattactcagtttttcttttatattctcatcatgaaatcaataactaaaaattaacttttttgataaataaaggaaagtatcatattaattttttaggcaatccattcaaaatgatatttaaaacaacagctgtcagggttgagataacaataccatttgtcaaaaacatttgtaaagtattaggaagactaatgaagagatttgtcccattaaaacctactcctgctgcaattgatacggctgcaatgataaagttatgctcattatgctcaaaatcaacctgattaagcattttcatcccttgaagtgctaccataccaaataaaactaacatggcaccaccaagaactggacttggaatcatttgagccattgcgccaaatttaggtaacaagccaagtataactaagaagagagctgtaaaatatatcggcttacgcgtacgtatcccagatatctgtaccagtcccacattttgagaaaaaccggtatatggaaaggtattaaataagccgccaagtaatactgccaatccttctgaacggtaaccattacgaagtctcttactgtctaatttatcgtttgtaatatctgaaagcgcaaggtaaacacctgttgattctaccatagaaactgttgcaataatacacatcattaaaatagaagtaaattcaaatctaggagctccaaaataaaatggcttcggaatatgtacaagtggtgcatctgctaccacagaagcatcaactaagcccataaatgctgcaagaattgtacctgaaatgagcccaataaggattgaaattgacttcaaaaagccttttgcgaaaatattaattaataaaacaacaccaatcgttaccagtgataaagttaaagattgtaagcttggctcttttgcattatcacccatatttcccatcgcaactggtattaatgtcaaaccaattgtagtaataactgatcctgttacaattggaggaaagaaatttgcaactttagaaaaaatgccagcaactaaaacgacatatattcctgaagcaattaaagctccaaacatatagccagaaccttgttgtgcaccaataattgataaaggagctacagactgaaaggcacaccctaatacaactggaagacccactccaaagtgcttacttaatcgtaattgtaataaggtggcaatcccacacataaaaatatctgtcgcaataagataagttagttgcttagcattataaccaagagcactagcaatcatgataggtacaagaatggatcctgcatacatagctaacaggtgttgcaagcctagaagtgctgcttgcgaattactttgcacattaaatttcattaagcatcagcctccgcaaaaacaactcgaccattttcaaacgctttaatacgggcaagagaagtaactggaacacctgttttttctaacaaatcacgcccatcttggaaagatttttcaataacgattccgataccagcaaccttagctccagcttgaccaataatttcaagtaatcctttagccgcttgaccgtttgctaaaaagtcatcaatgatgagtacagtatcatcgttagataaaaagcgactcacaatagaaacttgactcgtaacttgctttgtaaaagaatacacttcagcagttaagataccttcagtcatagtaatgttcttagcttttttagcaaatatcattggtacgcccaatgcttgagctgcgtacactgctggcgcaattccagatgcttcaattgtaacaaccttcgtaatgccggcttctttatatttatcagcaaaaactttacctatttcctgcattaactcaaaatctacctgatgagtcaaaaaagaatcaacttttaaaatgttctcacctaaaacatcaccatctttaagaatacgttcttccaataacttcataataaccccttcactctttagaaaataaaaaaataacttacctcaatcagaggacacaaatctcctctaatttatcgcttcattaacatgaaccaacaaggcaagctatttattagcttacttattgttagacattacggtgtcttgtagagacgctaagccaatcctcagcataaataagtaaatcatatatttaattgttatgtatgatagataactattgtaacatttttaattaagatttcaagatttaatttaaatggaatcaccattccaaatagaatttttaacaataacgtaatcaacgtgtctcaagctatccaattcttttcctcctgcgtaagaaatagaactttgcaaatcttgttgcatttctgtcaaagtatcctctagtcgccctttaacaggtaatagaattttcttaccttcaacatttttatgttctcccttttgatattcagaagctgagccatagtattctttaaattgctgtccttctacttccacaagttttccaggactttcaaggtgaccagcaaacagcgaaccaatcattaccatactagcaccaaagcggatagattttgcaatatccccatgtgttcgaataccaccatcagcaataattggcttgcgagcagctttagaacaccaacgtaaggcagctaattgccaacctccagtaccaaaacctgtcttgactttagtaatacaaactttaccaggtccaataccaactttagttgcatctgcacctgcattttccaattctctaacagcttcaggcgttcctacatttccagcaataacgaaagtttctggaagctcttgtttaatgtgttggatcatctctataacactgttagaatggccatgtgcaatatcaatagtgataaactcaggagcatcttctttcagacttgtcacgaagtcatattcatagtctttgaccccaaccgaaatcgatgcaattaaacctttatcatgcatacgcttgataaaaggttttctttcttcttcattaaaacggtgcataatataaaaataaccttcacacgctaatgtttcagctacctcttcatcaataatagtctgcatattagcagggattactggaagtttaaaggtatagtttccaagtttgacacttgtgtcagcttgtgagcggctagatataatacacttgtttggtattaattgaatatcttcataatcaaaaacaggaatatcgttaaacataatggttctcctaatgagtaaaatgaccttcctataactttgtataacaaagcatcgctaggtaaaaacatacctttcctttttaaattatagactttatttatttttagtcaatttttgatcaatttatttgaataatgttcgttttttttaaaataaatgtaaaatcctatagagcagtactctataggattttacatttattatattgcttttctttttcgaagataagttaatcctacaatagctaagataacaacaacgataacgaatagaactgcaaattgactaccaattatagctccatttttcggaatagctacttgtccgatggtaaaaatttgtgaggctactgcggttgcaaaagctcccgcaaattgttgtagtgtattcaagatactattaccatccgctgactgtgctggctttagttttgttaaagctgtcgtaaccatattacttgctccaatccccataccaattttagtaaggatatcaaaggctaaaagtactacaacagacttcgcaggaatgaatatagctgtaccaattaaacctatcaaagaaagggagatgcctatcataattggcttaaatgcaccaattttatccaggagataacctgcaaaaggggataaaaaaactactgctattgcacctggaaacataaacaaaccagctttggttgaagtttgatgtaaaacaagttgcaagaggttaggtaataagaacgaaagtgctagaggaatcatttgaaaagccaggacgccatacaataagattgagaaatctttatctttaaaaacattcaaattcaaaaattctagctgtttatttaaatagtaaaaaataacaaaactaacaatagctactaataagtaaaaaatagacatcttttcaatagctaaaagaagggttgccaagccaatacctaaactgataaaggcaggaaaattgagtttatcattaattcttacttgacgtttgggaatagaagccaaacctataaaggtggatatgataagtattggtgccagaagcataaaaatcatcttccatcctaacattcctgaaataacaccgccataagtaggtccaactgccggtgctaaaagtgtgaccatagcagctactcccatcattagtcctctacgctccatcgggatttgtgtaagaatgatatgaaacaataaagggagggctaatcctgtcccaacaccttgcaaaactctccctactaacaatatagctaaattaggggcaaagctatcaattaaaacaccagataaaaaaagcacatttgccaatgtaaaaatttgtctctctgataaatttttaatcataaatgctgacaaaggcacagtcacagcaacagctaacaaatttcctgttgtcacccattgaataacagcggggttaaccccaaattctttcatcaaaagcggaaaagtgacattcatagatgtttcaataagaatccctgaaaaacctaatatagccgttgtaattatggcaggcataatacgccatccctttttagtcattaaaatctccttgctttgattattatcataaaatagagcaccccgctaaatcaaggtgctccatttaattcattcgaattaaaattaaattgtttatattagttgtcaaaggacaatcaacagctcttattatatcaaataaagctaagaaaaacaaagagttttttgaatattaatgtcttcactttcttatctattctctactcatcaatcaccacttcagagaacataacaattgcaatttactcttaataccgttatcatgttcatatgctaatacccaagaaaatagtggcttttgcctcaaatgaatctgaaaataatttctttattacgttaaagacttactttaattatttattttctatacaaatcattacagatatttcaactctcaatcatgcagattttgacggtagctttgcattccatgatatagaaactagcatacctcatctggtaattgactccaactacttagcgattagtcagactaactcaaaaatagaggctaacgatattaaaacgttctcggaactctccaaaacaatgaccgagtttcactatatgctaaattttgacttatttaaccatctcccatatcgttttagattgcataataaggacggtcaaacaatttattcgaaccataaacctgaagatccttttgatatttatcctgaagaagaatatcctatagacaaatgggttcaaaacagcctaatagagaaaaaagcgaaagagctacatttactcttacctagcgcatcacaagattatattctagtacaatcttataaacgcttagaaaatgatagtgggcaactagttggttatattgaacatgttcataatattaaaccactgctagagggttatttaaaagaatccggtcaagctatcgttggatggtctgatgtcacgtctggtgcttctatctctaacgatgattttgaactataatccactcgtcactctaaaaagaaaactaataactaaaaggcactggtttaatttcagcgccttttattaatcaatctccagttgttgtaagttcacttttttctttaattggtagacctcgattagctgtaaaaatcaaaggaactacttctgttgtaacttcggaaaattgtagaccaaaccatcgtattggtgttgctgtccaatgctttatagatgatttcattagcataacaaatcgttcaccaggttttaggttttgactacttgagaaacgttcatcaaggacaataaacctaaaatctcctacgttactatcaggtctaacgctgtatgtctttccttgtttaggcagacgtccactttcaagtaattcttctacaatcgtacgaagatagcgtgacacagtctgacgcatcttaaatccaaggtaaagttctaccttcacaatgaagtctgttcccatcatgtcaactttatactcagctgtataaggttcatcagtgaccttaatgtttacaaaccaataaacttgtgcttttttagggcgcttatcaaggatagaatacatgatagacttatcaatcatgtcttcttccatacgatttgtcaaataaacaacgttagtatgataaatcggataacgatgatcatgtctaagtttatctaattgtccgatgtaatcttttaaatccaacaacttaacataacgcgaaacaattttactacctttataccagatagtcatgatgaatataattgctactgctataataacaacaacatagcctccatgcataaatttaacagctgaagcaaggaagaagattccctctaaaataccaaagaaaatcatcatcaataagactaaacctctttttactcctttttgaattaaaaagaaagacagtaaaatagttgtcattagcatcgtaattgttatcgctaatccatatgctgcttccatgtgcgctgaagtcttaaaaagcaaaacaatagaggttgtaatggcaaataagaaccaattaataacaggtatgtaggtttgaccaatattgtcaccaggataagttgaacgaaattgcgggaatatttttagtcgcatagcttcagaaactaaggtaaatgatccagaaatcagtgcctgtgaagcgatgatagctgccaaagtagctaaaataacgacatgcattgtaaattgcgaagggatactagcaaaaaagggattcaattcatttcctgcgttcttattagctaaaatccatgccccttgcccacaataagaaagtataatggcaaccttaacgaacggccatgaaacatgtatatttccacgcccaacatgacctaagtcagagtatagtgcttctgcccccgttgtcgccaggaaaatagatcctaaaataaaaatacctttatgattctctggactaaataacaatttcaaaccgtagtatggattaattgctttgaaaacttctggatgggcaaaactattaaggagaccgctaatacctaaaaaggcaaaccatataaacataattggcccaaataatttcccaatcacacccgttccaaacctttggatggcaaaaagtaacagtaaaataaacaaggtcgcaaaaataacgttactctgattctggaaaatatgctgcaaactaggaactacttttaatccctcaacggctgaagttacggttacagctggcgtcaaagctccatctgacaacaaggttgcacctccaataacagctggcacaattaaccaaggtgtcatttttcgaacaagggtatataaagaaaaaataccaccttcgtggtgattatccgcctttaaagctacaagcacatacttgatagttgtaataagtgtcagagtccatatgattaaagatatagaacctaagataaacgattctgtaacactagaaataccaccttggttttcaaccaatgattgcattgtatagagtgggcttgtaccaatatctccataaacaatgcctaaagcaataataaatcctgcttttgatgctttatcaaaagaagaatgattgacatgttgcatttctgccaaccctccgattaaataatattagtcaaaaaaatggctgaactcattatagcagattaagttaaaaaaacaacacttatctataaaaagaccagaaattattaaagcgtttcctggtctttactattttaatcacgataaacaggttgaggtccataagtttgactgactggcattatttctatgcgattaatattaatgtgttctggttggctagcaacccatgacacggtattagcaatatcctctgcttgaattgcatgcgcaccttcataaagtttttcaactcttttatgatcccctttgaaacgtacagttgaaaattctgtcccttcacataaaccgggttctaggttagtcactctgattttagttccagctaaatcggcacgcaagttgagagaaaattgttttacaaaagcttttgatgcgccatagacattagctcctggataaggaattgttcctgcagttgatcccaaattgataattaaccctctattaacttctaccattttaggtaaaatgcatcgtgtcaagtaaattaatcctacaacgttagtattaatcatagtcatccaatctccaaaatcagcttcatatgatttatccaatccaagtgctaaacctgcattattaaccaacaaatcaattgattgcaattttttaggcagactttctaaagctttgtcaaccgattctctacttgtaatatccagttgaagtggataaaagtgaccctctgaaaacttttctccaaggcattttaatttatccattcgacgagcacaaccaataacgctataaccatctgaaactaatttagtaacaatagctgcaccaaaaccagcagatgccccccgtcacaagcgcaactttacgtgatatcatagacactcctcctctagtatatagaaaaacgagctaggaaaaatccttctcgttttataaattattttgatttctcatcaatagcttgagcagctgtaatgatagcaagtttataaatatcttcagcacttgatccacgtgataaatcatttactggagcattcaatccttgtaaaatcggtccgattgcttcaaacatacccaaacgttgtgcaattttatagccaatatttcctgattgaaggtctgggaaaataaaaacatttgcttttccagcaacatcactattaggagctttaatttctgcagtttccggaacaaaagctgcatcaaattgtaattctccatcaacagctaattcgggagataaatctttggcaattttagctgcttcttgaactttttcagcttgaggcgcttttgcacttccttttgttgaaaaactaagcatagcaatcttgggatcaatatcaaatattttagctgtatccgcagtatttactgcaatttctgctagctcttgtgcattaggatcaatgttaatagcacagtcagcaaaaatataacgttcctgtgtattttcacggttcatcaagaatacacctgaagtgcgtgaaattcctggttttgttttaataatttgaagagcaggacgtacagtatcagctgttgaatgaatggcccctgataccataccatctgccaaaccaagttttactaacataaccccaaaatagttaacatccttcaaaagacgatctgcatcttccatagtagctttgcctttacgaatctcaacaaaagcttctttcatctcttcaaatttttcgtattgttcagggtcaataatgctataatcttgatcaacaaaaccaagtcttgccaaagaatcgtgaacttcgtcagccttacctaaaataacaggatcaacaagaccttcaaatttcaaacgagctgctgcacgtaatacacgttcatcgcttccctcagggaaaacaatcttaacataatcacttgcaactttttctcttaaaccaccaaataaggaacgcatatatataaaaccttctatttctaaattaatgtaattccatgataacgctgtcaaagtcatctgtcaagtctagcgtctgtttatttatttttcccataaaagggtcgtaaaaagacaaagaatgacaatgcaatgcttgcctgtttattcctagatccatacgtcctccgtacaaatcatctcccaaaagaggaaagccgatatgagcaaagtgaactctaatttgatgagtacgccctgtatgtaatttgatatccactaatctaacatcaccataacgagcaactacttgataactagtatgtgcatatttgcctgattcatggacgcgcctcgtaataatactatcaacatctcgtgcaataggagctataatatcaccactatctgctaaatcaccactccctgatactaatgcataataccttttttcaattgctttagcctgaagttgtttatctagacgagcatgggcataaccatgcttggcgaataacattaatccacttgtatctcgatccaaccgggtcacaatatggacctgctgattggcatagttattagacacataatagtgttttataaaattagcaattgtatttgaatgaatagagctaggaatactagcgaaaccaaaaggtttatttaaaatcaaaaaatgatcatcctcataaataatatctaaatcgtgaggcactggttccaaagtttcgtgagaaggctcgtcaggaatatctattgtaacaacatcgccaatctctaataagaaaatagcgttctgctcttcaccattaacaaaaatcttaccacctctgtacttaatctttgctaataacccccttgaaacatcatgacttttcaaaagtgttttaactttgcacctttcttttgctacgtattcaaatttcaatgttcaggttctccgataaaagcatcgttaacacgttcccaaaaactagtgtgacttggagttgaaacaaagttaatacttttttcgtcaatactatattctattttggtaacattcttgtaatggactgttttgttatctatagaaattgtatagacaccaactcgtttaggaactatctctatagcatcttttttggggatgataaccgatgaccccaaggtacgatagacgcgattattaagactagaaatttctgttagttgcaaggcttctatcgttgggtggagtactgccccccctagtgatttattgtaagcagtactaccggttggtgtagaaactaaaatgccatctcccctaaacctttcaaataccacttgattaataacaacatccgctaccattgttttttcaatacgcttaatagtagactcatttaaagcacgcgcacgaataactcgaccatcttcaagggtaatagttactttcaaaatgggataggagatttgttcacctttatcatttttcaaattattaattaatgtgtcaacttcaaaatctcgatagtctgtataaaaccctaaatgtcctgtatgaacaccgacaaaccttactttatccagttgtttttcgtacatgtggaaggctgacaaaagcataccatctccaccaatagaaatgacaatatcaggatccttttttgataaataaaaatcaggatcatgtttaaaagcagcaaagagctttgaggctacacgcttgctttgatatttcccgttagcaattatagcaacacgtgttgctctatctgtaaaattcatctgtgtcatcactatttcctacaccatcgctcaattttcgatttaaaggatcaaataaaagctgtgcttcacgaatatcttcgcgaatcttacgcatttcttcatccaattctaaagcgatttttgctgttttctccagtctttgtttaatttcttcagggaagtccccctgatacttgtaatttaatgaatgttcgatggttgcccaaaaattcatagccagagttctgatttgtatttctgctaaaactttcttttgtccatctattgtgtctacaggatactctacaacgacatgatatgaacgatatccactagatttcatatgggtaatataatctcgctcctgaaccactgtcatgtcatgacgttttctcaataaagcaaggacttcatcaacgtcatctacaaattgtaccatgatacgaagccctgcaatatcttgcaagtcctgagcaagattttcttctgaaataccacgtaaaaccatcttttcttgaatactttcaaccgactttacgcgtccagtaacaaattctattggagagtgacgattttgctttctaaattgtttacgaataccacgaagctttatttttaattcaccaaccgtttgaatataagggtctagaaatgtttcccaatccattgacattctaatcctccaaaatatttaatgtactctcttgtaaaataaactttttttctataaaattaacacaacaattaatattataccatatttaggaaaaggaagtgataagatgacacacctagaaattgaatacaaaactctattgaataaagacgaatttaatcgtctaacaagcttattttctcatgttcaacctattactcaaaccaattactattttgacacagaaacatttgaaatgaaagcacaccgaatgtcacttcgtattagaacgttacctaaccgtgccgaactaacactaaaaatccctagagaagtgggaaatttagaacacaatcatgaccttactttagaagaagctaaatatatcgttaaaaatggccaattccctgaagatactgagattgcttctttaatccttgaaaagggagttgatccaaccaaattagctgtctttggacaacttacaacaacaagacgagagatggaaacttcaatcggcttaatggctctagacagcaatatatatgctgatattaaagattatgaacttgagttagaagtcaaacaacctaaacaagggaaaagagatttcgaccagtttttaaaagaaaataatattaattttaaatacgccaaaagtaaggtggctagattctctgctactttaaaaaataactaacgttgagagattggattttccaatctcttttataattctcatttaagcaagaacttaaaatctcatactatctatcctcaacattgttattgcaagcattttcatgtttcttatcgtgaattttttctatttttttggtaaactattagtatcaatctaaaggagtcatctatctcatggcagaacaatacgccgataaacaaatcaaacttttctcattaaccgctaatagagaaattgctgaaaaaatttcccaagcttcaggaattcctttgggtaagatgtcatcacgtcaattctctgatggcgaaattatgattaatattgaggaaacggtgcgcggtgacgatatctatatcatccaatctacaagcttcccagtcaatgataatctctgggaattactcattatgattgacgcttgcaaacgtgcaagtgctaatactgttaacatcgtagtcccttattttggatactctcgtcaggaccgcatcgctgcatctcgtgaacctattactgcaaaattggtcgctaatatgttagttaaagctggagttgatcgagttcttaccctcgacttacatgcagtgcaagtacaagggttcttcgatatcccagttgacaatctttttactgtcccactatttgctgaacactataatcaactcggtctctctggtgaagatgtcgtcgttgttagtcctaaaaattctggaatcaagcgtgctcgtagtttggcagaataccttgactctccaattgctatcattgattatgcacaagatgattctgaacgtgaagaaggctatattattggtgaggtagaaggtaagaaagctattattattgatgatattttaaatacaggaaaaacctttgccgaagctgcaaaaattttagaacgtggtggagcaactgagatttatgctgttgctagtcatgggctttttgctggcggcgcagctgatattttagagtctgcaccaattagagaaattatcgtaacagactctgttttatctaaagagcgtattcctagcaatattaaatatctgacagctagccatctcattgcagatgctattatccgtatccatgaaagaaaacctctaagtccattattttcatatcgttcagataagaaggattaattgatgatttatttagacaatgctgctactaccgctctaaccccatctgttattgagaaaatgaccaatgtcatgacaagtaactatggtaatccatctagtatacatacctttgggcgtcaagcaaatcaacttttacgtgaatgtcgacaaattattgctgaatatctaaatgttaattcacgtgaaattattttcacttctgggggaactgagagcaacaatacagctatcaaagggtatgctcttgcaaatcagctaaaaggtaaacatattattacctctgaaattgaacatcattcagtcctacatactatgacttacttatcagagcgatttggttttgatattacttacttaaaaccaaatcatggacaaataactgcaaaagacgtgcaagaagctttacgagatgatactattatggtatctctcatgtttgttaataatgaaaccggggactttttaccaattcaagagattggtcagcttctcaggaaccaccaagctgtttttcacgttgatgccgttcaagtctttagcaaaatggaacttgatcctcattctttaggaattgactttttagctgcttctgcccataaatttcacggtccaaaaggtgttgggatactttactgtgctccccatcactttgatagtctacttcatggtggagaccaagaggaaaaaagacgtgcttcaactgaaaatataattggtattgctggaatgtctcaagctcttactgatgctacgactaacacccttaaaaattggactcacattagtcagctgagaacgacctttttagatgctatttcagaccttgacttctatcttaataacggtcaagactgcttacctcatgtacttaatataggttttcctggacagaataatggcttgttattgacacaattagatttagctggattcgcagtttcaacaggttctgcatgtactgcaggaacagtcgaacctagccatgtcttaacaagcttgtacggagccaactcaccacgtctaaatgaatcaatacgtattagtttttcagaactaaatacccaagaagaaattcttgaattagctaaaaccttaagaaaaattataggagattaatatggcatttgaaaaagaaataaatcttccagactgcaattacatttacactatcagcccgaacattaaaaaatataccttacgcgatactacattcactcaaaatcgcttaggtaattatgaattagagcgtctcctagaaacagtgcctaattctggcgatggctttcctctaaagattacaatcaataaagaactttctggttttaagctcttaattactgataaatctggccttagaatagtaaatatctttaaatctaccgatcataaaattcttcaagacaaattttatttcttaatggacagcctcgttgagcgtgatatctttacgaaaaccacaaaataatttatcgaccactatttttaacattttagtggtctttttgcgaaccattttgttgtcactttcacaatctttttgtacaatagagatgtgaagaattaagttatataactgattctaaatcgaataataaaatttttaacaaggagataattttgtgattatggataagtctattcctaaagcaactgctaaacgtttatcactgtactaccgtatttttaaacgttttaatactgatggcatcgaaaaagctagttccaaacaaattgcagatgccctaggtatcgattctgctactgttcgacgtgatttttcttattttggtgaactaggacgccgtggttttggttatgatgtcaaaaaacttatgaacttctttgcagaaatattgaacgatcattctacaacaaatgttatgttggtggggtgtggaaatatcggtagagctctcttgcattatcgtttccacgatcgcaataaaatgcaaatttcaatggcttttgatttagatagcaatgatttagttggtaaaacaaccgaagatggcattcctgtctacggtatttcgactatcaatgaccatttaatagatagtgatattgaaactgctatcctaacagtacctagtacagaagcccaagaagttgctgacatcttagtcaaagcaggtataaaaggcatcttgagtttttctccagttcatttaacattaccaaaagatatcattgttcagtatgtagatttaacaagcgaattacaaactttactttatttcatgaaccagcagcaataaatagttcattatttataaaatatctgcttcttctcgaaaactataatatttattttttccaacgatgatgtgatctaggcagacaattcccagatgatcacatgatcgttttatttttttagtgaaacttaaatcactttcactgggctttggagaacctgagggatgattatgtatgataatcaaagaagttgccatgtttttacaagcataatgtagaatttctcttggctctgctactgaacgacgtacagtaccaataaaaatagttctctgttcgataatacgattttgtgtatccatataaatagctactaaatgttcttgttttttatcccctaattcgagcatcattttcctcgctaattgttcactacttaaaatttgctctttacgatcatattcagctttgtgaatccgttttgctagttctagcatagcttttatttcgacggatttaacctgaccgattcctttaatggattgcaactcctgtaaggataattgaccaaaatctgctaaactgcttatgttttctaaaatttgcgttgaaatttccagaacaggtttttctttaatacctgtacgtaagagaatggctaataactcctgattactcaatctatctgcgcctaaatcaactaggcgttctcttggtaataaagcttccttttttaattcaatatggtacataaaacacctccagtcataatattcgtaaaccaatcaaaaactcatgttttaaatcaataaaaaatacttagatgaaaaatctaagtattttttatttaacgataggttcgtgcacaatttctaagcgtttgtcgcttgataatatgatcttttacaatctgatagatagtagctgcaacaggaacagcaagtaacatgcctaaaatcccccataaagcacctccgatagtaatagccattaaaacccacatagaaggcagtccaatcgatccaccgacaactttcggataaatgacatttccctcaaattgttgtaaaaggatcaagaaaagaacaaacaagaatgcttcagtaagcgattcagtagcaattaagatgaaaccgattgtaacaccaatgtaggctcccacaaccggtattagagctgtaaaagcaactaaaaccccaactgttaaagcataaggaaattggaagatcaacataccaataaccgtcaaacttcctaaaatcatagcttctaaagtttggcttacaaaaaaaccatggaaacgttgatgaaggatatgacgaacgtaatggaatgttttgcctgttgaacctaaataggtatcaattaacaaattaaactgacgtcccaactgctccttgtttgccaaaacgtaaattgaaaaaataaaactaacaaaaacattcaggagtgttgccgcaatagaggaaactgaggttagtaaatttgttaaaacagataaaacttgcttcaaaatctgctggctataaccacttaaagtagaaactaagtctttatctgttcccatataatttaaaacctcagaaatttgtttattctcattgagattattaaccaatttagcaagtgctccggtatcaataaccaataaagaactcaaactagaaatcaaatctggaatgacaattgaaaatagccagacaattaaaccaataaaagttgcataggataaaatcatagaaacactacgcttgattgccattaatagtctagatcctttaaaaagctttatatataatcgctcatagactgacattacaatattaataatataggcaattccagctcccatcaaaaaaggaaatattgccttatgaagcgtagttaaaatattagaaacagctccccaataagcctgtatagcatagcaaatagcaaatgttatgacaacataatagacctgccgtttttcaaatttcatgaaatctccttattaatcttaatttctttcaattattatacactattttatgaatgagaaaaagagagttaacagttattagtctgttctttattctatttgactgccattacttgcaataaccttcttgtaccaataaaacgattttttcttgtaacgcttgagtgtcccctctcctttattattgcgatcaacataaatgaaaccatagcgtttttccatttcaccagttcctgcagatactaaatcaatacatccccatgtagtatagccaattagattaacaccatctacatatatagcatctctcattgcagcaatgtgctgacggaggtaatcaatacgataatcatcttctacgtaaccattctcatcaggaatatctactgctccaagtccattttcaacaataaacatcggtttttgataacgatcccagatagcatttaaggtaatacgtaatccaagcggatcaatttgccatccccattcagaagatttcaagtaaggattcttaagagatgcgaaaatattttcttgaacctgttcactgacagttggattacctgaagctactcggcttgaatagtaagaaaatgaaataaaatcaaccgtatagtctcttaacaaagcaagatcttctgctgtcatttgaattgaaatacctaaatgctcaaaatgttttttagcataattagggtatttgccacgagcttgcacatcaataaaaaaataattttctctatttttttgcatcgaagcccaataatcttgtggatgacacgtatttggatagtattgacctgcagctagcatacatccgatttgattatttggatcaacttcatgagcaatttttactgcaatagccgaagccactaactcatggtgagctgcttgatatttaatttgctcttgattttcaccatcttcaaaatataagccagcgcccataaaaggagcgtgtaaaatcatattgatttcgttaaaggtcaaccaatatttaactaaccccttaaaacgagtaaataaagctcgtacaaggcgctcataaaaaccaatcattttacggctccgccacccaccgtaatgtttaataaggtagataggacagtcaaaatgtgtaatggttaccaaaggttcaataccatacttacgacactctttaaaaatattttcataaaactgaagaccagcttcatttggatatagctcatcaccctttggaaaaatacgcgtccatgctattgacatacgataggttttgaaacccatttctgcaagtaatgcaaggtcctctttataatggtgataaaaatctattgattcttttgctggataaaagtatccttcctcaaaatcaaacattttcttttgtcctgaaataattgcaaatcgatcttctccagtaggaacaacatctacatttgctaggccacgtccatcaacattgtaagctccttcgcattgattggcagcagttgccccgccccataaaaaaccttttggaaatacttgttttaccatcatttacccctcttgttttttcttatcataatattaaaaaagaccagttactgacattgattcgccaaatactggtactatccatgacatgaactttctacttagaaggtcttttcactaattctgtgtatttaaatacttaaaaatagtatcaaaacacttttaaaggtagagttttatcgtttcagaaattttagcataggcttgatctgttaggtgcaaaccatcttttgtaaaactgctagcaagctgacctttttcgtcaactaataaatcatacaattcaatataattaatgccagaaattactgataaggttttgtttaaagcttttattgtttgattatttcttaccttgacacgctctatatagtcatcttcttcactaacaggtaaaacactcagtatattaatctctgtcatataagattccgcacgaatttctgcaattatatccgtgatattagctatgatttctgactgtgaatgccctaaaccaatatcatttgttccaattaaaataaatactttggatggtaatagttcccatacttgggttctcaagttttctaaaagccaataagtatctgatcctgctactcctctattaactaaaggatagtcacgtcctaaatgtttttttaaaggaaaaaactcaacgatagaatctcctgtgaaaacaatggcaccttcttgtactgtctgattgttaatctcaaaaaactgttctcgtttcatttgataatctcttaaagctttgtcaataacttctaacatcgttctccttcattattaaatatttctctaggctttcttgtattataacaaaatttcacctgagaattgaatagtatgcttcgttaaaagctacgtggtcctattcattatcactcatcttgtgaagaaagttctctatcgtttctaacacaccatcttgatcgttactaactgtttgatatttagcaatagctttaatttcttctggcgcatttgacatagcgtaagaaatatttgctgctctcaacatttccacatcattgcccccatcaccaaaaaccatcacttgatcctgtttcaatccccacttttcaaggagaatagcgataccatccgctttattgacatcagctggtaagacatcgatacaaccaaaaccactagaggtcaatctgatatgatgatttttaaagtgttcactaatatctaacaacatctcagaaacaagattttcatttacccaaagtgtcatttgaaaatagcggtcatcatctaagggcagcaaatggtctttatagataaaattaggcatatagtattctaattcagtccgcctattaataggagttcttcgctcaaggtatgaacgtttttcaccagataagctgatgagtgtctcaggatagttctgatataaataggataaaacagctgcaactgtatcattagataaataagtttcttttagtaatgtgccatcttggtcaatgacacgaccaccattttcagcgacgtaggcgatacgattagggtattccaaaaagtttaacaacaattgatcgtataaattaccactagcagctacaaatttaatatcatacttctccatcaacgttaataaagaagaaaaccgtgctttatcataagttttatctgagcgtagaaaagttccatccatatctgttgctattagtttaatcatacaagtaacctttgcctttcaagagggtgccaaatatctcaatatgttctttcattatatcacatataaaccaaaaagatttgatacctgatacgtcaacggttctattaattaagttaaattttgtttcagagattaaatcgacttttacctatacttatctccatactatcagagcttgtttaacataatgatttactgaagagttttcttattgttgagttgaataatagattcgtaactattacaatagtcataataaaatatttgagattcgaaattgctatacgtgtttttgagagacctaacattattttttttcacatagttattctgttttgaaaaaataaataattgagtatattaataaatttggtcatattaatacaacaaaaaatccttacatgagataaggagattaaacgaccctgtaaggattttgaagttattagaaacactctaagcaaaaattttaaagcgttttctctatgacttatattatatgtcatgttcctatacaaaacttacactatcctttcaaaaaataatactatcctacgaaacccattttttgatagttttctgttataataatactatcctacgattttagaaagaaaaacgatgaactcacttgataatttactatcacataatttagaagataaccggcatttattaccctatgaacacatgcatactgaggttagaaatggttaccctgacattttatttcactggcatccggaacttgaaatttcatatgtccacgaggggaccgcacgttatcacatcgattatgatttttttaatagccaatctggtgatattatcttgatccgtccaaatggtatgcattctattcatccgattgaaaataaagagcatatcacagatagcattaaatttcacttagatttaataggatattctattgtagaccaagttagccttcgttatttacaaccgttgcagactagctcttttaagtttatccaatgtatcaaacctagtatgacaggatataatgatatcaaaaattgtttgtttgatatttttaatatttcaaaagaagaaaatcgacattttgagctactcctaaaagctaaattaaacgaactcttgtatttactctattatcatcaatatgtcattaaaaaacatactgatgatacctacagaaaaaacgagagaattcgtgatctgattgattatattaataataattaccagcaaaatcttaccattgaatttttagctgattatatggggtatagtaagacacattttatgaccgtatttaaacagcatactggaacatcctgtacagaatttatcatacaagttcgtcttaataaagctagtgaacatcttattaactccactacggccattattgatattgccaacagcgttggttttaataatctatcaaattttaatcgccaatttaaacgctattatcatacaactcctcgccagtaccgcaaacaatttaccaacaaaaaagacggtagtacgcttgtctatagaaatataaatacaaaaaaatagaaactagttaaatccatgactagtttctattttttattatttaagcgttaattagtttacatcagctgttcacgtacttctttaatttccgattcattcacaactaaaaaaatggtgtcgccagcattcaagatagtatttcctgatactacagccgatgtcttatgatgaatttgagtcgttattaacacattttctggtaattctaaatctcggacatactttcctgatattttatctgaaacagttaattcaatcaatgtaggtgtcattactttatcttttggattgaaggtcattttagccaacatcgcttcataaataggttctccctttaataaatccatgacaatataagataccatcgttacaattccaatagccattaattgttttaaatcgccaaccatttctgtaaccaaaatcatagctgttagtggtgcttttgagattgcaccaaaatagcccgccattcctagaacaacaaataaagatatctgctgatgagatattataccaaagtactgcatacctactgcaaaaaaagcacctgctaaagatcctaaagctagaattggtaaaaaaattcctcctggcaagccactactgtaactcaacatactccataaaaaacgaatgaggaaaaataatcctaacatcatcagactaagattactcctaggcagtgatacaattaagccatttccaccccccaataattgtgggaaatagtaaccaataggaagaataaaaattaccgctaatataccatataggtgagatggtagatgaaatagtttgcccaaataatcatagatcacatgaaatcttaaaattacccactcatagataaaacctaagatacccaaaaagagacccatgagtaaaaaaatccaataaaagttgagatttaaagatggtaattctgatggtaaagctaaaactggggttaaaccaaagatattaagtgagacaaagtttgccactaaacttgctaccaaagctgttatccaaactaagcgagaaaaatgatggtaaatttcttcaactacaaataaaaggcctgcaataggagcgttgaaagctgctgaaagacctgctgccgcaccactagcaattaaaacacgtttttccattcgactagcattgagatactgtgcaattcccttgcctgtcatagctcctaactgaatactgggaccttcgcgaccaagcataagtcccgaagaaatagctaaaatacccgcaatgaatttcttccatacaatactaaaccagtctggcgatagcattcctttaagttcaccttcaacatgcgggatacctgaacctttaatatcaggatcagatttgataaaaaaacctattatcactgcagcgataatactagtaaccgtaatgctcaataaaataattggttgataatgggcacttttataaagttccataacaactaaaaaaattttttcaatcgctaatcgaaatatgctgacaacaaatcctgctattaagcctactactattcctctccaaacaaatcccagaattgattcaagtgaaaactgaaattcatttttatgattttccatattttcctccttttcttacaattattttagcaaaaatatcacaaactttctaggaactcttggtaactaaaaatacctctcatcagagaagtacttttagttaatagattacttacgatacattttaaattgtaagtacaaatcattgtaaataccaagccatttttgacccaagttattataaacttctaaatgatcaattgttttatcaggaggataaaatgctttatcatttttgatatctgctggtaacagcgcttttgctttgagattaggggtcgcataaccaatatattctgcattttgtgccgcatttttaggttccatcatgaaattaataaaggcataggcttctttgcgatgctttactgttttggggattacaatattatcaaaccaaaggttcgatccttcactaggaacaacgtaatgcaaatgcttgttcccatcaagcatttctcgtgcttctccagagaatgtaacaccaatcgctgcatctccctgaatcatatagcctttcatctcatcagcaacaatagccttaacgtttggtgttagagcatctaactttttagaagcggcttttaattctgatatgttctttgtattcaatccatatcccaaggaatttaaaccaactccaataacctcacgtgcactatcaactagcatgattttatttcgaaactctggacgccataaatcatcccaatgtttaggaggagttttaactaattgatcattataaacaatcccaacagttccccagaaataaggaatcgaatatttatttttaggatcgaaactcaaatttttaaacctggctccaatagcatcccaattagctatctttgaatgatcaagtttaaccagaaggttttcttttatcattttgtcaatcatataatcactaggtacagcaatatcatatgtcgtcccaccctgcttaattttggtgtgcatagcctcattagagtcaaacgtttcgtattgtacttcaattccagtttcttttgtaaatttttttaataaggctggatcaatatagtctccccagttataaataactaacttatctgagttaggtgttgaactactctttttttctaagtaagtggttaaaccaaagaggatcaggataacaagaacaataccgcctaaaaaggaataaactctacgcattcttttctcccttctctttcgaaatatagtaataaccaattaccaataaaatactaaataaaaagacaatagttgacaaggcgttaatttccaatgatataccgcgacgtgcgcgtgaatagatttctactgaaagcgttgaaaagccattacctgtaacaaagaaagtaaccgcaaaatcatctagcgagtaagtgaaagccataaagaaacctgaaataatacccgacgacaaatagggtaacataacttctttaagcatttgccaagttgaagctcctaaatcataggaagcattaatcatatcatcattcatttcttttaaacgaggtaagaccattaaaacaacaataggaatagagaatgcaacatggctcaataatacagaagtgaaacctaactgtaaaccaataacagtaaatactaagagaaaacttgcaccaatcataacatctggtgctactaaaaggatattattaagcgataaaatagaggtttgatgtctacgtcttacctgataaatccaaatagctccaaaggtaccaataattgtagctaataaggcgctaagaaaagccaaaaagaatgtttgcactaaaattagcattaagcggctatcctgaaacagttctccatagtgactaaaggtgaatccagtaaaagaattcatatccccacctttattgaaagaataaaaaatcaaataaataataggaatataaaggataataaaaacaagtgctaaatagatatttgcgaattttttcatgctttcctctcctttgttaaccacataatagcaaccatcactaaaattaaaataacccctatggttgagcccatacctttattttgtgtgattaaaaaatgttgttctatggctgtccctaaagtgataactcgattaccaccaataagacgcgtaagcataaagagactcaaactagggataaagacagactgtacacctgctcttacaccattcagagataaaggaaatataaccttctgaaaagtttgccatgcatttgcacccaagtcatcacttgcataaatgagattttgatcaatatcatccaaggcattaaaaatgggtaataacataaacggtaattcaatgtaagctgctacaaaaagaaatgaaaagtctgtaaatagaatctgttttgggccgatacctataaaggttaagaaggcgttaattcccccttgttgaccaaatatccccataaaagcataggcttttaacaaaagattaatccatgttggcaaaataactagcattagccataattgcttgtgttttaattttgtaagcaaataagcagctggatagctaatcaaaagcgttatgaaactaacgatgcctgcatataggaccgagttaaagctcattttaagataggttcctgagctaaaaaacgtctggtaattagctaaagtaaagtgcccattaatatcaaagaacgagttccaagcaatcaaagcaacaggtgctaatacaaataagaataaccaagccatataaggaattgaaaatagactagaggttttcttcatttctctcctcctcgatagcattgattaaaccatcctcatgatcgtcagtgtctacatattcttcaatgcgcgcatcaaattcttcttctgtttcattaagacgcataatatgtatatcttctggagtgaaatctaaaccaataacttcaccctcaatagctttacgagttgaatgaatcatccattcattacctaaatcatcataagcaataatttcatagtggacacctcgaaaaagttgtgtgtccactttaacttgaagttttccttcatcgggtagggtaatttgaagatcttctggacgaataactacttggactgattcattagggcgcataccgccatcaacagcctcaaagcgcttaccgttaaattcaaccaaataatcctcaatcatcttgccagataagatatttgattcacctataaaagttgctacaaaatgattgataggttcatcgtagatatctactggtgttcctgattgaacaatttcaccttcattcatgacgaaaatccaatcactcattgccaacgcttcttcttgatcatgtgtgacaaaaacaaaggtaattcctaaacgttgttgcagttcgcgcaattcatattgcatctctgtacgcaatttcaaatccaatgctgataagggttcatctagtaagactactttaggttgattgatgatagcacgcgctatcgcaacacgctggcgttgtcctcctgataatttttgaatggctcgtttttcaaacccttctaaacgaaccatttttagagtttcttgaacacgtttttgaatttctttcttatccatttttttcaactttaatggaaaagcaacgttttcaaaaaccgtcatatgtggaaacaaagcatagttttggaaaacggtatgaacatcccgtttattagtgggaacatcattgatgcgtttcccatctaagtaaatatcgcctgtactcgcctctagcaaacctgcaataatatttaagatagttgatttaccacttcctgaggcccctaataaggtgtaaaatttaccttcttcaagttcaaaattaatatcttttaagacaacggtgttgctgtcttcaaatacctttgatacatttttaaatgcaatgattgggttagtcaattctcataaatcctccatttttctgactaaagtaagcactaaactactttataatagcgactcaccgataatacgaacttctggttccaaatggacacctgaagttgattcaacggtgttaataacatgttcaataagattttcataatcttgagctgaaccttctgcaatgttaaccataaaaccagcatgtttttgactaacctctactccaccaatacgttgacctttaagatgtgcttcgctaatgagttgccctgcaaaatgtcctggaggacgtttgaacacagaaccacaagaagggtattctaaaggttgtttcagctcacggagataggttaaacgatccatttcctgagtaatcatgagatgatctcctggttttaaggcaaacttagctgatataacaatatctccactctcttgaatgacagaatgacgataaccaaattgcatattcctagcttcaatcgttttgagttcaccctgtggtgtcaaaacctgtgcagacaataaaatatgagcaatttcaccaccgtaagcgccagcattcataaagaccgctccacctacacttccaggaattccgcaagcaaactcaaagccagttaagctatgataacgtgcaatacgagttgtttcaatgagattagctcctgcttctgcttcaataacataaccgttgactgtcacagttgacagtttatcaaacatgataacaaaaccacggataccaccatctctaacgataatattactcgcatttcctaaaaccatccaaggaatattttgactgttagcaaacttaacaatacgcgatagttcaaggcgattccttgggaatgcaagataatcagcaggtcctcctactttagtataagtatatttctttaaaggctcatcaaagcgaatatcgagaccttctaattctttttgtattgttttaatcataacctttatctcaattctgttttattgtgttttatagacacaaaaaatcggcataaaaccgatttctattataccaaaaatataggttgttgacgatacattatcacaatttctgtgtattttaattttaaaatcctaactgactattcgactggttttaaataatgaacttctcctaaattcaatttttcgagatagtcttctagcttagaaccattaggtaaacttagttgaggtgctatttcgagtaacggaactagaacaaatgctcgcttcgtcatatacggatggggtactactaaatcttcttggttaatcacttgattaccaaaaagtaagatatcaatatctattgtccttggaccccagtgctcatgtctcacgcgctttaagcatttttcaatttcttgacaataatccaataattcaaaaggtgctaagtctgtctctacctgacaacatatattaaaaaaatcttcttggttagtattcccccaagcagctgtttcataaatagcggaaatttgcgcgacttttgtcttttgcaaatgatcaattgaaaagagagcctgcttcagaaaagtttctctatcaccaatattactacctaaactcaagtaaacggttgtcatgctcgcctgcgctccaattcaattccaactgattcatagtgcccattaattggtggattgtcttttgtaatctttaatgtaatagcttgtactggatgaaactgtaagaaaatatcttcaacaataacacctgctaatttctctattaattgatactgttcgttttcaacatgatttttaatacagtcaaaaacttcaccataatgaaccgtatcaattaaatcatcagtttgtgatgcttttgccaaatcaagtgatagaacagcatcaacttgaaaaacttgccccaatgtttgttcttccgaaaaagcaccatgataaccataaaaccgacatttatttaaataaatcttatccatattacaccaactgactaattactgtcacaatgtccttatttacttcaacattgtgaacacgtacaatctgacacccctttgctattgcccatgccgataaagcagccgtccccatatcacgttcagttacttccctattaccacctagaagataattaacagtacgttttcgagagatcccaaataacacaggataacctaaatcacacacttgttccaaaccttttaatagttctaaattttgctcctctgttttagcaaaaccaaagccaggatctatccaaatattatcctttgaaacacctgcttctaaagcacgctctgctctttcaagtaagaattcacaaacttcttttttgatatcttgataaacagcttcttcctggttatgcatcaaaataattggaacatttcgttctgctgctaaagatagcattttaccatcatataaacctgaccaaacgtcatttaaaatatgtacacctgcatcaagggctgcttgagctacctctgttttataagtatctattgataacaaaagatcagggtagacctctctaatagctttaatcattggaactacacgtttaatttcttcttcagcagtcacaaatactgcacctggccgcgttgattctcccccaatatctacaattgccaccccttgttcaagcatctcaccaacttgatttaaagctgaatcaattgtggtataagaaccaccatctgagaaggaatcaggcgttacatttaaaatccccatgatacaagctttacctgtaatatcatattgtcctattttcatcttttatcctttttgtattagcgatagaatttcttgtctttcatatcgatcgtccttgtataaaccacgagctaccgttgtaatcgtcttacttcctggttttttaatgccacgcattgtcatgcacatatgctctgcttctatcataacaaaaatacctttaggcgccaaagcatcctctaaagcttgtgcaacttgtgctgttaaacgttcctgaagttgaggacgcttactcgccacttcaactgcacgtgcaagcttactaagtccagtaacacgtccatcgtttggtaaataagcaatatgagctttaccataaaaaggaaccaaatgatgttcacacatggaatagaatggaatatccttgacaatcacaacctcttcatgattttcagaaaagactgcagtgaattgctcctttggatcttgattaagtcctgagaacatttctatatacatttttgccacacgcttcggtgtatctttcaatccttctcgattaggattttctcctaaagcctctaaaaattgataaatagctttttccattttttcttgattgggcattaatttatcctatcctttttaagttgttgtagttttgattaatagtagctcctgacgaacttgagaaataaaataaagggagccagtaatcacatagaaatctttatctgatgtcagatttatatcatgtagccatttcttccaatcactaactctagtgtacgctttaggatatttgtctaagtttattgatttagggtaatcaaagctagtaaccgaaaccggagcgatactagacaatgattctaacatactctctatcggtttagtattaattgcagcaaatagaatatgcacgtttttctgctgatatttttttataacttgaacgagagcatcgacactttcattattatgagcgccatcaatcattacattcggaaagattaattctgtacggcctacccattttgtcatttcaagcccatctttaatggtctgtagggttaactttggatatttgtctcttaataataaactggtagttatagctatgctagcattggaaacttggtgatgtcccggcatttgcaactgaatatgatcaatatttgcttgaggacctatatagttaaaataattttcctcttcttttatataaaagtcattgtgtaaacgataagtctggctgtgggtttccttggcttttatttgaaagacttcttcaacatcctgacgatcattagcatatacgaatggaactcctttttttaaaacacctactttttgctcagctatatctacataagttcgtcctaaaacctcctgatgatctaatccaattgacggacaagtaaccgctaaagccttgaacatgttggtagaatcataataaccgcccattccagcctcaataatgacgatatcaaccggacagctattgccaaaataatagaacatcaaaactgttataacttcaaattctgtagctggttctaggttggtctcaaggtgcaaccgttcaacaactggacgaacagtttcaacaagtttgataaaatcagactctggaatcatttgaccatcaatgctaatacgctctctaaagtcaacaatatatggtgatgtaaatgttccaacttgataaccagaattggtaaaaatatgttgtaaataactagttgttgatcctttaccattcgttccaacaacatgaatggcagataggttgttttgagggtttcccagctgctctagcatccatctcatacgttccaaacctggtttaataccaaaagctaatttactatgaatccattctagcgcttcttgataagtcatcttatttacctttctttaacatcgtatgtacttgtccaatactaaaaactaaaatagcaagccagataaaaataaaacctattacctccccactaacgatagtttctttaaaaataaacaatgctagcaataattggatggttggattgatgtattggataaagccgataatatttagaggagccctcttaatggcttctgcaaataataaaagaggaactgctgtaatgattcctgaaagtgagagtaaaactaattgtaatatattataatcagttagaaaatctttggcgaaaaacactatataaatgagtgcaaacggagcaataaaactactttctaccagcatcgaaaaatcactagataaagaaattgatttttttaataacccataaaaaccaaaagaaagcgctagagttagtgaaattaaaggaaaatgaccagtttgataaactaaaattccaactcccatgattgcaatcaaaattgcaaggctaactactcttgccaggtgttcacgtaaaacaaggaccgacaacaaaattgaaataatcggcatcatataataaccaagacttgcctcagtagcgtgaccatgcgtgactgcaaaaatatagaccaaccaattaattgaaattaaaatactggctacaaacattgtccaaaatgactttttattattaactaagccttttaagtcttttaaatagactgtttttctacccgaaacgagcatataaataagcatagttaaaacagtgaatataatcctataagcaaacgtactatatgcttcaattccagataataatttccaataaagagataacagcccccataaaacataggctgacaagccaaggataattcctaaattatcttttctcaactctcactccttttcgctcaatattaagcacttgaatctgtccacctaaacataatttacttaactctgtgacaattgcttgttctttttctttcgaacacagaaccattaccgtcggtcctgctccagacaaataagtagcatacgcaccattttgagtgctgatttgttttatcacttcaaattccttcaccaaaggttgacgatatctttcatgaaagaggtccctttctatagcccatccagcagttaccaaatcacctttcaacaacgacgcaaccatcacattagcgacgctgcttgaagcaactgcatcctcataactcaatttttgaggtagtacatttcgactatcacttgtttttaattcataatttggaataaaagcgataaaggaactatctggaaacatcacttccaaacttttaatatcatttttcactattgatgaaataactaaatcaccaaaaatggccggtgctacattatcaggatgtccttctaatcgggtagctatctctaatttttctttttgagaaagagccaaatttcctaattgattggctaattctattcctgcaacaattacagaggaagaagagcctaaacctctggccaaaggaatatctgaaaacatttttaagcggtgtggtgccaaatccgacttaacatgcaaagctgtttgaataaggaggttagtatgatcttttggaatatttactaaattgtgttcaactaaccactctgtactttcttctaatacttcaatgattaaatactttgataacgcaactcctattgaatcaaagcctggaccaatattcgcactagttgcaggtacaattatcctcatttcaccctcctattactttgaaaacattgattaactgaatgacaccactctcaggaaactcctcaataaattgagttattttctcttggctaacttcatctgttaatacatagatttcttgttgtttatcacccaatgctttttcgataacatttttcaaacctatattttcttgctcaaagtaccttccaagtgtatcactatcttcagcatttctcaaagaaatagctagatagtactcattgaaaatatcagactgcattgacaacctacacggacaatgataagtattcataggcttaatttttatctgtgatcgaatactacgactaatatcgatgatatccgctaaaacagaggttgctgttggattttgtcccgcacctggtccataaaaaagagactgaccaatccctattgattcaatgaatactgcattcatcacatgattaactgcagctaagggatgcttttgagaaattagtgtcggagaaacgtctacacttataccagttggagtttcacgaagatcagctaccaacttaatggcaaagcccatctcctgagctacttcaacatcctctgagcgaatactagaaatccccttataattaacatcatcaaaatcaataggcataccaaatccaaattgacttaagatagtggctttgtaggcagtatcaataccttcaacatcatttgtgggatcactttcagcataacctaactcttgtgccttttttagagcttgttcataagaccatccctcttcaaacatttttgttaacatgaagttggaggtaccgttgagaattcctaataaacgtgtcattttatctgaggcaaacgaatgcgatagggtccttaaaataggaatgcctccagcaactgctccctcatagaataaagctagacctctagcgtctgctaaatccatcaactcttttccgtgtaaagcaatgagatctttattggctgtcacaatatgtttaccaaatcctaatgcttgactcaaataagttttagctggctcaatcccccccattaattccactacaatatcaatttgtgaatcttgaagaatagtatttatctctgtcacaaagttataagtaaatccctgattgatgaaacgctggcggctttcattatctcttactaatactttatcaatcacaatatcttcgccttctaaagaaagtagcttatgttgattttcttttagcaaatatggaatacccttagcaaccgttccaaaacctaataaagctattttaatagtcatgaatttctccttagaaattgtctctaacttcaagacaaacattggctatattataacaaattaccaatattttttatagggcaaacgcgtcttgtcctatgaaagttcttaaaaagagaatattatttcagaaaagatgatacaataaaagtactttaaaagttaaggagaaataaatggcacacacacctactagtcatcgtaaaccacgaaaacgttccccatggttagctattgcttctgtcttttttttgttaatagctttaatcggcatatttctattcttcaacaatcgttcaaagcaagaaataaaaacaaaaacgaacgcctctagtcatcgaaaaattgtcacatctatcaaaaaaaagaaatggattaagcaaaagactcctgtcaaaatacccattttaatgtaccatgctgttcatgttatggacccttctgaagccgccagtgctaacttaattgtggcacctgacatttttgaaagtcatataaaacgtctcaaaaaggaaggatattacttcttagcccctaacgaggcatatcgtgcactaaacgaaaatgccttacctgaaaaaaaagtcatttggattacttttgatgatggaaatgctgatttctacactaaggcataccctatactcaaaaagtacaaggttaaagccactaataatatcatcactggctttgttcaagaaggacgagaatctaacctcaacgttcaacaaatgctagaaatgaagcaaaacggcatgtcattccaaggacatacggttactcaccccaatctttctctcttaactccagaactacaaacccaagaaatgacactatcaaaacagtttttagatcaaaaactctctcaagatactcttgcgattgcttatccatcagggcgctacaatcctacaaccttggatattgctagtcaatattataaactagggcttacaacaaacgaaggagttgcaacaaaagataacggtttgctttctcttaatcgaattcgtatcttaccaactactagcgatgatgatctgatcaagacgattaaccaataaaaagaagccttctggcttctttttattcttcataagatttaaatggttcatttttacgtggataacgatctggagaaatcgataagcccatttcttttttctcatggaaaagctccactaataacgctagcatcatcaaaatcattacgaatgaaaatggcagagcgacaataattaaaacgttctgcagcgctaacagaccaccagacaagagtaagacaatagcaatcactgccaacaccagcccccaaattactttagttcgattttttgggtttaaattaccatcttctgtcaacatagccaaaacgtacgttgcagaatctgctgatgtaataaaaaatgaaaaaattaaaatgatagcaataatggataaaagccaacctaaagtgtagtgattaaaagtagcaaacaatacttcctctgttgcaaactttgtcaaattagtacccagttgttgtacctgagttgataatgtgccaaatgctgcaaaccatacaaaactcaataatgtcggtattaaaagaactaccgttaaaaactcccgaatgctacgccctttagaaatacgagcgatgaaaactccaacaaaaggagaccaggaaatccaccacgcccaataaaaaatcgtccaattatcaatccaagaacgtttagtattgtcaaaagcagctgcacgaaagctcattccaaagaaattttgtaaataagagcctaaagactctgttagggtatcaaaaatacgaaccgttggtcccaatacaataactaaagctaagagggctaccgctaaaatcaaatttaagttcgataaaattttaacaccttttcctaaacctgataaagctgacataacaaataaagctgttgtaatcaggataataacaatttgaacaaatgcattattgggaacacccaataaaaaacttaaccctccgttgatttgagcagctccaaatccaagtgtcgtagcaactccaataactgtagcaacaactgtggtgatatcaacaatttttcctagccaaccatctgtcttatcaccgaaaagaggctttaaagtgacagacaagaggtatttctcttgctttcgaaatccaaaataagctagagctaaagcaaccaatgcatatactgcccaagcatgtatcccccagtgaaaaaatgtaaaacgaaatgcatcagctaatgctgtttgcgattccttaggtgcaccaggtgtcgaaatagcaaaatgcgataagggttcagctgctccgtagaagaccaaaccaatccccatacctgctgaaaacatcattgctatccatgatacagttgaatattcaggacgtgaatgaggttgccctaaacgtatttgtccaagaggactcataataaaaaagacacacaaagcaagaattgaagtaactaacaacaagtacaaccaaccgaaattggtagatacctgttcacgcaagatttgtgtccaagattgaaaaccacgaggaacaataattcctaataagactaaaataagcgatacaattagtgaacctgtaaatacaggcgtaatatgttttttactcaaaatttcctcctatactaaaatagtatagcatactttaataaatactcctctcattttaaccacctgtatcaagacctctccttgtctcctcaacaaaaaagaaccaaataacattatctggttcttgtgtttgacttagtgattaatcactatttggtgtaaataccaaatgttcgttgacaaaggcatcaaatccaagttggctcaactcacgaccatatcctgaatttttaatacctccaaacggtaattccggtaatgatgtccaccctgaattaataaatgtcatccctgtttcaatctgagccgccacttttttagcatgttctggatcagaagaaaaaacagtgcttcctaaaccataactagaatcattagctaaagcaatagcttcttcttcagtatccactttatagatagaggctacggggccgaaaatttcttgattatagattggatttgctttagtgatattcgttaaaacagttggcatgacgaagtttcctggatgatctatagtgtcatttccaaaaactacctcagcaccgtggtctaccgccaatttaatttgttttaaaacatcatcctttgcacctgcagatgacagtggagccaaggttgtttccgaatccattgggtcgccccatttagcagacttaaaggtctcaactaccatatttacaaattcgtcatacttatcagccatgacaatgaaacgttttgaagatgtacatacttgacctgcattatataaacgcgcaaagaatattgttttactaagtaaatcaaaatcagcatcatctaaaataagaaaagcatcgttcccacctaattccatagacgattttttcaaatttttaccagcttcagctgctattgatgccccaccacgctcagaaccagttaaacacacacctgcaacacgaggatctgatataaggtttgaaacttgatcatacgaagcaaaaatatttttaaacgctccttctggagctcctgcttctcggactaaatcctcaaacgcttgagctgaggcaggacaaatagaagcatgttttaaaagcatagtattacccactataaagttaggggcaaatacacgcataatctgataaaatgggaaattccatggctcgacagcaagtaaaacaccgacagcttgcttcaaatagtaagcctctccatttggactttctaacggaacaggttttaaaaacttttgcccattatcagcataatagtcagctatgtctgcacacaagtccacttctccttgtgcttcagtgaaaagttttcccatatctttagtcataacttcagcgtacttatcacgatccttacgtaataaatctgctactttatgcaattgattttggcgttcttcaacattatcttctttgcgccatgtcttgtagagggcatgcgctatgtctaatgactgttcgagatcactgtcactgatattatcgaattcatgcaatacttcgttagtgtacggataaattgttttatatgccataatgttccctccttttgatatcctcattataacatttatgaaatcgattacaaatatttagctttagacaagatcaccaagttccaaggatagcttgcattgttaaactaactataataatgcctaaccaacacgctgcacctaaaagaattgattttcctccagttttaattagtttgctaacattagtatttataccaattgcccccattgccataacaataaaaaatttagataaaaccttaagtggctcaaagatacgtaacgaaaaacctaatgaagcaactatcgttgttagcaaagaagctaagataaaataaagcacaaacttcggaaatatcttagtaacacttacagattgttctttctgcgtttgtttcatatggtaaatagataatacaatcgtaattggaatgatggctaatgttcgtgtcaatttaacaatagtagctccgcccaaagtattgctgtgattgatagcatcccatgcagtagcagttgctgtaactgacgaggtatcattgacagcagtccctgcaaataatgcaaaaccgtgatcagagagaccaataaaattccccagcgttggaaaaattaaagccgctaagatattgaataaaaaaataaccgaaatagcttgtgctacttcatcatctttagcattaataactggtgcagtcgctgcaattgcggacccaccacaaatagatgaaccaacacctattaaagtagcaatcgttttatctaacttaaataacttttgcaaaacataagcaataatcaatgaaatggaaatcgtcataataatgatgggtaacgatgatataccaactttcatcacttgcatgaggtttagtccaaaacctaataagacaactgctgtttgtaaaatatatttagatgtaaaagcaatacccttattaaataattgtcgattttgataaaaggatccaacaattattccaatcaagatagcaaaaactggtgctcctattaaagggagataaagcccaagcaaccaagatggtatagcaataataaagcataatattaatccaggaattttttccttaaataacatgatagtcctcctcacattgactattatatcacaagctttaaaacgtgacaggaaaaccgaaagaggaccagaatatgctctgatcctctttcattactaattcacaattatttagttactttcataaatggatatgatttttcattacctaaaatcaatttagagccctcttttttataggctgttttttcaccatttttcacaatattaccatagaacgcatttgcctttttattgatatgcgatactttaataacacttgttaagcgatgtactttaccatccataactggcaatgtcatttcaccagtattagtattatattttcctccggcagcttgtgcagcactttgaaaacttctatcaatttgttggtcaatttgttggtcagtgatttttgtttcatcaaaaatctttttacctgcttcacttaaatcattgtaagtcaaaccttgatcttttaattgtttttcaagagctttatcaataaaagtttttatagcttgatggaattttacctcatcaatttgagcagtgactgttatctttgcctcatcgtttttgacgttcatatgcatattagcgcccttaaccaaatcagctgcactaatccccatatccgctgcctgacttccaagttgttgttctatttctttctcaacttgcttctctaaagaaactgtacgccattttccctctagtgactgatgattattccagaaatagagaccgcctgcacctacaattagaataagtactagtacagttaaaaaaacttttaaaaactttttcatgataaaaactccttatgataaactacattaatcataacataatatcacaactccttcaattaaaatagtaaaataattatataaaagtttgtaattttatacattttaataaaacctattatttgtaaaaatgacataatctaaaacatttaattttactacataataattataaaacaattaatctcagtaaaggttttcatttgtatatttaaatattttttcgaattattatattatttgtcgcttttttatggtaatataaaataaatatagattttaaattaatatatacatttctatatttattgatttttatctcagtataacttagtgtcgtagagattaattcctatcattcaccgctttattttaggataactaaacaatttattgtttaaaacgaaaggatttatgaatgtctaggaaaacatttaaacgtatactatcgattggagtttgcacgctcgtactatcgatgagtctttattacactgaaaaagcccacgctattgctggtcctagtgaccgccaatacgtagaaaacccaaatcctcacattattgtaaatgttacaggtactgatcaaaacggaaatagcattttaccgcattatatcgaagtcaatgtaaagatgggacaaactttaagtaaaaaagaaattctagattatattgctcgaaatttaaactctagtgtggaggagaaagtaaaaacgttcaatacagcaacatcgagtttaaggaaagtgcttatctgaagcgtcaattagatgatggcaagacagaagaaatagcaattgataacgacggtgttactgtacctaaagacggtccaaacaaattttggattgacgttccagtaacttgtacggtaaattcaataactccaaagctccataaagtagaatggggtacacctatttcagttttacattatgtacagttcgttgataaaactacaggtaaaactttagaggattttaaaactattgattttgctgaaatcgaccttggaattcgacataccggtgatagcattaccgataaggaactatataactcagcttacagtgcctttttaagaagtaaattaactaagcaaggttatcaattccaatacagaattagtacagatgttcaacaaaatcttcaagtcaccaaaaaactttacaactacgatgtaaatgaagaattgattaactatcaaatcgaaaacaatagacccacactaaacctatctaatgaagccgagactgatatctttttcgaaagatattatgtttctagagatggagatagtttagcacgtacagaatcaacaatttcgattaaaatggttgatgccaaaactgaacaaccgctatttaaccacacattaacgggttatcaattgtcaactgtttccaatgtctataacagactctttgaagaaaatcttatcccaactacaaaatcaggagaaaaatattttattcaaaatatgaaaaaaacagctgaacaagaatatactgtttacctttcagaaacaccttattctgaagagaacgctcccgtaatttcttatgatgcaagacctgttgattgggattatcactcaggcgcttcaggatcacttgaaaatcagcctaacatctatactgaagaagattcaactgaatttttgggtaataaaccacaagcagcttgttatccaaacaaacaatttgcttgcgaaaatactgactctaaatacaactatagctatttagaaaaatagttataaccgatagggttaatctctcattatcttatactgattaaaatcattaaacttgtttccattttgactggaaacaagttttttatatttatttgtcacatataattgacagtcttcgaaaaatgatatatactcaaaatgtcatctatatatgacactcttcttagattctttactaaaggagctaataatcgtgaatcgtcttagagaatacagaattaaagctagcatatctcaattagctttagcaaaatcagttggtgtcgccagacaaacaataaaccttattgaaaataataaatacaatccttcgctagatctttgtataagactagcggaatgcctacaaacagacctcaatactcttttttgggatagtagacatctataacagactagactctctaaatctatgaaaactcgggaggttaggtcgtgttattatttcaatctcaaactttattaaatagttcaaggataggagaatattatgaaagaaaagaaaaatttggggataaaattaataaaatccctatatggtattaatggcccattcgatgaatacagagaacaaaaaatcaattaccttggaaatctattatttgcaaccactagcctctatcacattttatcctctatcatcgcctggttcacggtaagtaaatatcccacagagactgcatatactctcctagctttaacattctttctatatttttgtatttttctaattgttattccctcttatctcaacagtcatgatttaataacgtcactagaagtctcaaaaaatgactatccagtagcaataaagaaaaacaaacaaaaatttatcaaaatcgggatattttatactgtcatccagtggcttatcttgggtttaacaactagcaataacactccgctgattgtatcactattttctttaaaagttattttgtctagtattatgtccggtgtagcttacaatggagttatgtatctaatatttaaaaacaatgttgatattgaaaaagatgaataatgacaacatttcatctctaattgttctcactgtctatataaataataaggctggaaaattttccagccttattatttatggtaatatctttgcagcattaatcgccgcttcgtagtcaacatctgaattaacattgtcaacgtattcggtgtaagtcaccttattatgctcatccaaaataagaactgcacgtgttaacaaatgccactcattcatcaaaagagcgtactcttgaccaaacgaatgatcataaaaatctgataataaaatcacgttatcaaggccttcagcactgcaccaacgcttctgagcaaatggaaggtccatagaaacagtaataaccactgtgttatctagctctgataattcctcattaaaagtacgtgtttgttttgaacaaatacctgtatcaatagaaggaacaacgctaataactttctttttcccttcaaaatcttttaaagatttttgagataagtctgtagctattagtaaaaaatcttttgcaatatccccaacttgtagctgttttcctgtaaaagtaacaggatttccaagaaatgttgtcataagtttacctccttatcaattacctttattttactatgaagcttcttctttttcgaataattgaactgataattaaaggtacttacttccttcgcgtatgctcaaagtcgacaactcatcacaatgattactgataaagtcctttacccatactttattatactttgaataatccctaagcgcccagccaatcgccttattgataaaaaattcttgacttcctgtatttcttaaaataaaaagtgacaaaatatcagtatttgttttttctttaaatcctagttgatgctcaatagctagtcgcctcatccaaaaatcttgatcaagtgaccattctgacagtaaattcataaccttgtcatcttttaaggataagttcccaaaaatcttagtcagaacatcaatactatcccaccactgttgatgacgagcgtaaaactctagtctagagcaatcattataggtgagaaattgactcatagctaatagataatcaagtacaaaatgatgatattcacgatagtcactttgccaacatttatcaagcaattgccaatcaatttttgcttgtcttttagcagcctttataagctctttgtagagcatacgtcgctcaggtgatttaataccatagcacttaaaatgatggcgtaaataagcctcctgttgcttagaaacttctttgtcacttgcagctttaaatttcctctctaaacttaggaataaatccattacgtaatccccttgtatttttcaaaaagcgttgtaattccttcatgtacagattctcttgatacacgtaaattagcgtaaggagtcagttcatcaaaatcccctacttgaacactataatgcgcagcatcaaacatagaaatatcatttttatcattgccaaaagctataaaacgattcccaaataatttcttagtggcttttcccttgtcaactgcaatgggatttatgtacaaacatttttcaaattcgtggaaaaagtgactactaagtccaaaacgatttaattccgctaacatttggtctgcccttcccagctgatcaccaaaatacaacaccatttttatcggtttctcaattttagaaacttctagaagctctccccttttttgaggatcaacataagcaataaagggaattttagaagcctgataagtagcgtaattaaagacctcatcaacaaaatatggaatctgatggcgatgacaatatgaaataatagtactaaaaaagtcactttgtaaatagtaactatccactaagtgaccattttcatgtaaagtcgcaccatttaaaccaataatttttgataaagatagcttgtcgccaaggatacctatagtgtctctataagatcgcgctgtagcaaaagtgactctatgaccataatcaatctgggctctctctagtattccttgtatttctttagatagactcataccatcaaaacaaagagttccatctatatcaaagacaaaatccattctctcaaagtcccatccttaagttaaaataggttttcatacgtgcataaacatcttcatcaccaacaaaaaagatatgatctccttgctctataactgagaaaggccccggagaaacaataaatttcccttcgtgttcaatagccacaatagtcgcaccagtttgatgccatacatttaattctcctattgacttaccaaggtgttcagaatcttcactgacaataatttcatatggtgctagtgggtattgtttactaaccgcacgtgtttgaagcaaaaaatcatcaactaaagtagctaactcttccatttcttgttgctgagccttgatattatcacggattttacctttcaaaatagcaactgaatgagaggtttcatattggtttaagaattcaattgctttttctttagagagaataatggctccactgccatgctttaaagttaaaatctgtaaatctgctaaaatattaagacccttacgtgctgtttctggtgatacgttgaatgttgaagcaatagttgttctagatttcaacttctctccaacttcataatctccatttgcgattctttgtgcaaccgctactgctattttttgatatttagatgttacaatttcagattgttcagaaaccatccaaccctccttatcctaataaaaacatacatattaaaccacaattagcaaaatattgcaaatatatcttttttgttaatatctaatgtctttagtaaatatcatataaaaggagctggtctcccagctccgagtgtcttatcataaaaagtagtttactgaattaagattcactagtacgagcttctgagattttttcttttgcagcctcagtaccatttgatactgcttcttttgttttctctgctccagaggaaattgctgctttagctttgccagcttgttcagaagcaaagtttcctgttgcttgtgctgcatcagatacacgatcttgtactgtcactgagtcagcttcatgttcagctttagtcttaatatctacgacatttgcgttcaattcaacaactttaaggtgggtcatcacttcaacgttttgactgacaatcgctttaatgctttcaacgatagctgggatgtccttgccgtattcaacaacgatgtctaaatcaactgcaacttctttagtaccaacttcaacatttacaccatcagttactgagtcagaatttacaacgctattttttagattagagaagaaacctccactcacagctaagagtccgtctactgattctaaagcatgtccaacaattttagcaattaccttttcttcataagttactgaagttttaatatcttgtttttgattttccataaataaatgacctcaaaccttctagtcctttttcttaaagctctctgaagcacccttaatggtatctttaatgtcagcaagtttttcttttgcatgacctttcaatttatcaactttaccttcagattcaacttctttatcgccagtaagtttccaacagattcttttactgaaccagaaaccttatcaacttttgcatcaaatttttcttcagacataatagcctcctactaataacaatactttaaactacacttaaatcaattattgtacacgtggttcagacttcatgtcttccactttatcaacaccgctacctacggcacttttaacgtttgaaacttgattcgaagcaaattcacctgttgcttgtgctgcacttgttacacgatcttgaagagttactgaatcttcttcatgttgagcacgagttttaatatcaacaacattaacattaacttcaaccacttcaaggtctgtcatacgtttcacttcagcttcaacaacttttttgatatcggcaaagatagttggaacatgtttttggtattcagcaacaatatccaaatcaacagcaacttgctttttacccacttcgacatttacgccatctgtaactgaatcagaatttacaacgctattttttaaatttgagaaaaaaccaccatttacagccaaaagaccatctacatgctcaatcgcaattccaacaattttttcaatcactttatcttcgaaagttaattctccacgaacagctgtcgtgccagaattgttagttgtgtttttgatgtaagtttcagtcataatagttcctctttcttttatttaaataatgtagaataaatataaacgaaaaattttattttctcttattaaagaattggtcaagcatacctgttctttgcacataaagtccagcataagcacctagcacaatgataacaagagcaagaattgttttaaagaatccaatggttacaatcattgcagctaaaacgagcccaataactgcacctcctagtggatatctgtatttcctcacgaattctgacatattagactcctattctacacgacttttattcgtcttagcatttccaacattttcttcttcaacttgcttaacaaatactctagtgttcattttcttttccaacccaaagaattcttttaagccaagttcaacatcactttgaatatgttcaagttgttccggtacatttgtacgagaagttaaaagacctttaacatcaactttcacttttttcttatataaatgagctgtcacactaggagatttcatcaaaccagtttttaatacttctgttttaacaaatccctctattgcagatttttttaacatcaatttaccagttttatcagctagtttatactctgtgtatcgtcttggataaaacagaactaccaatatagccagtaaaacgatcacaaacagcactaatgctccccaaaagaaataatgatacataccaacgtcaatcggtgatggcaaattaaaatcccaatctaaccaattaaaagatggtagataaatgtgttgtttactgataacagctacaaatcctagtagggtaagggagattagacctagtaaagtatataaactttttagtccttttgacataggtaactccttttctagttattcattttacctagtacaaatgaagtaacaatgacaacaataatagcacctacgattgaaggaatcaaagccatacctgctaacttaggcccccatgttcctagtaaactttgaccaacaaatgaaccaactaaaccagctaagatgttagctatccaacccattgaaccacctttgttagtaacagcccctgcaatagcaccgataatagcacctacgattaatgaccaaattaaactcatgataaataccttctctttcttaactaatcattccactagttatgtagttatgattttttgcctaatacaaatgaagtaacaatgataacgataatcgcacctacgattgaaggaatcaaagccatatctgctaacttaggcccccatgttcctagtaaactttgaccaacaaatgaaccaactaaaccagctaagatgttagctatccaacccattgaaccacccttgttagtgattgctcctgcaatagcaccaataatagcaccaacgattaatgaccaaattaaacccatgataaatacctttcttcctaagtacatctcagtgtacaaacttattttgttcttaactaaataacaagagtttcttaagtgaccactcggcaattaattaagttgttaactatactaatattatacaactttataaagtgactgccaagtaaaaagcttggtaaatgcttttatttttaagtgaccacttgatatttaattgatattgttattatactctttttagaaaagaatgcaagagaaacgcttctttttttaaaatagtatggtcacttttagaaaacgctttaatatcaacctttttagtaagtaaaaaccaaatgataacttattttttctattcaaatgatgcaaaaagactaagaatacaattcttagtctctgattatttaagcatataatagaagaaagttagttttcctttttgctaataggagcgacactcgctaataatttctttaacccaatacctggaaaatttatttttaactcttgagtctttccgctacctgaaacttcaagcaccgtaccgtccccccattttttatgagttgcaacatcaccaatctcccatgatgtctcatggctattgttcgcgttaagagcctggagttgggcagttacttgagattgtgaattacttttacgtgcctgaagcgcttgttgaagactcattccttgaccaaattgtgtaggctgttcttttgaatatttcacaccaaatgaagaattaactggtcgagctaacccttggtattgtatcagttcatcatcaatctcacgtataaaacgggttggtctattataactagttttaccaaataaagtacgggtattagcattggtaaggaaaagtatttgttctgctctcgtaatcccgacataagctaaacgacgctcttcttctaattcatcagcatcctctattgcacgcgataaaggaaatactccttcttccataccgattaagaaaacaactggaaattctagacccttggcagcatgtaatgtcattaaagtgacctcagccgtttcagtggcgctatcatcagtatctgctattaaagctaaatcatttaaaaaacgcgatagacgatctaaaccagtttcaccctctactgtaatctctgggttatcgtcaaaatttttagtcactgacaagaattcttcaatattttcaatacgcgcttgactttctaatgtattttgaacttgaagtgcttctagatatcctgtcttatccagtaggttttctgtaatctccgttacagttaaactatctagattactacgtagagtcaaaatcagattagctaaatcccaaacagcttgagcagccttcccttttaagggcgacatcatgacatttgaagaggcatcaagaagagacatgctctgttcataggcaaatgaccgtattttttctaaagttcctggccccacccctcttttaggttcatttacaatccgctcaaaagaaatattatcagaagtatttgcaaggatattgagataagcaataacatctcgaatttctttacgactatagaattttgttccaccaaccattgtatatggaatattggattttaaaagtgcttcctcaatagtacgagattgcgcattcgtacgataaagaacggcaaaatctttgaaattttttccttgttctcgaacgatgttatcaatagttgatgctacaaaaactgcttcttcttgctcgttgttagctctatgatatacaatttgctcaccttcatcattttgagtccataattttttgggacggcgatttttattatgattaatcacattattagcagcttgaagtattttcttagtcgatcgataattttcttctaataatacaactttggcttgcggatagtccttttcaaaatcaagaatattttgcatatcagctccacgccatccgtaaatggattgatcggcatcaccaacaacacaaatatttttgaaacgcgaagctaataacttaactaattggtattgagcgtggttagtatcttgatactcgtctacatggatatattgatacctctgttggtaataggccaaaacatctttattctgatcaaataatcgaagtgtcatcataatcaagtcatcgaaatccatggcctcacttctacgtaattcctcttgataagctttatagcatttagcaattacctgtgtatacatatctccggcttgcttctcatatgcaatttcatcaagaaggtcatttttagcattagagattgtacctaaaattgaacgttcattccacttttttgtgtccaaatttaattgcttaatgattcgcttcattaaagtacgctgctcacctggatcaacgattgtaaagttacgattatatccaatataatcagcttcacgacgtaaaatacgaacacacatactatgaaaagttgcaatcaaagtatcttgggtagctggattcaaggcgatagcacgttcacgcatttcacgcgctgctttattagtaaaagtaatcgctaaaatattccaaggattaacatatttttcatctattaaataagcaatacgatgagtcagaacacgtgtttttccagagccagctcctgccataatcaaaagcggtccgtctgtcgtttgtaccgcttctgcttgtttatcattcattccaattattaaaggattcatttctactcctaattttgtcaaaattgcttctctagtatatcattttttcatctttttcccaatagaaaaaggagttaaacagacgctgtctaactcctaccttttttacttctcttttctctctccagttacaaacattgtaaaaatagcagttgtaaccatttcgcctttctgatttttaatgtgaacatcaacgactttttgtagtacgaccattatgaacacaagtaccgatgacagtaagcagatcatctaatcggcctgccctcaaatagttgatatttgattgtagagttaccgcttcatatcctgttgaaatagcaactaaaccactgacttgatcacacagtgtaaacaaataaccaccatgagcattaccataatagttgagcgaagagtcaacgaccttcgttgttaaggtaacttgaccttcttcccagttttcaatttcgtaattctcaaatacttttacttgttctaaattgaatttcattctactataacctcactttttttatgaccattatagcagaaaataaggaaaccataactgtaaacgtttttattttaaactttttaactgacctattataacaaaagagctcagatactctgagctcttttgtcatgatttcatgctttcttttggcaatattaaatttaatataatacccactatagcacttaatgctgttcctgataaagttagagcacctagatcaaggactgctccaccgaggcctaaaactaacatggaactagcaataatcagattacgaacctcagcaaaattgacacgattttcaatcaacacttttaatccattacttgcaataacaccataaagtaatatagccattccaccaagtactgcactaggaattgtagagatcaaagctgtaaatttaccaaagaatgaaaaagcgattgcaataaaagctgcattacgaataaccgttacagaagctatacgcgtcatgccaataacacctgtattttcaccataagtagtttcagctggtcctcctataagagcagaaaatgcggttgctaaaccatctccaattaaaagacgatttaaacctggtttttttagaaagttacgcccacaaatctgacctaaaactgtatgatcaccgatattttcagcaatcgttacaattgagattggaagaatggcaagcatttctggtccaaagtaaagtttataactgtgaaataaacctgtcttaaacggtaaatagaattttggcaattcaaaccaggcagctttttcaactggagataaatctaccaagccaagaatgattgataaaatataacctccaataattgcaaataaaaatggaataatcttgataaaacctttccctttagtattgataaaagctgcaatcaagaatgtaacaacagcaactagcattttacgccaatcacctttagcgacaaaacctgcattagttacagcagagtttgccaaacctaaaccaataacaataatcataggtccaatgattattggtggcaaaatcttatcaacccatgaatttcctacgaacttaataaccgtcgccacaacgacatagattagacctacaaaaagaatacctgtttgagcagccgaaatatcgccatgcatttgtttcatggctaatgccatagctgtaatataagcaaatgatgagcctaggtaaacagggactttaaattttgtcgcaacttgataaatgagcgttccgcaaccagaagcaaataaagccactgatacaggcatccctaaaataagcggaactaatatcgtagctccaaacatggcaaaaacatgttgaaaacttaacagcaaaccttgaaataattctggtttttcatcgatatctagtaataagttagtagaatgtacttccttatctactagaatttgattactttcacctttagcatttaaagtcatatctaaactagtcctcttgggcatacaaaaaagcccactttctatagcaatatagtcataggctttatttttttcctgatgtttttctcacctcacgggatgagtttaaaaacctacgctgaaagaattatagcataagacattttagaaaacaagacttttttgaaactatattgacaaaactatgctttttcattatgatagttaacataataaaatataccgaatgacgtcattcaggagaagaaagttagactttcgccgaaggaattacactctcaggtgtcttaagacaggactgattgacagacggacttctggagagacctataagtagcaacatctttgtattgacaccaagatgtgctctaggcgccgaaggggcaagaagagtaaaacaactcctccaatctctcaggcaaaaggacagaagctaaaagccaatattaataatgagtagtaagcttaataagtttactactacctttatttgtgcgctttttagctagcatctttcagaagttatctcttttagagataacttctttcgtttcattacagaatccataggtatgtcatgtatcaaaggagaacatatgctaacactttttactcatatcaatagcttcgtttggggtccacctttacttgctttattagtcggaacaggtatttacctatcatttcgcttaggttttattcaattgagacaactttctagagctttcaaattgattttccgagaggataacgggcaaggagatatttcaagttatgctgcccttgcaactgctcttgctgcaacggtagggacaggtaatatcgttggtgtggctacggctattaaatctggaggaccaggagctttgttttggatgtgggtagctgccttttttggaatggcaacaaaatacgcagaaggattattagctatcaaatatcgcacaaaagatactaatggagaaatttctggaggaccgatgtactacattatcaatggaatgggacaaaaatggaaaccattagcagtctttttttctgcagcaggtatcttagtagctcttttaggaatagggacattcactcaagtcaatgcaattgcttcttctcttgagcatactttcaaaatatcaactagatttaccagcctcattcttgctgttatagtattatttattatatttggaggtataaaatctatttcaaaagtttcagaaaaaatagtgccttttatggctataagctatattttagcaactctgattattattgcagttaattacaataagattccacatactttccaactcatctttagcggtgctttttctgggacagcagccattggtggtttttctggagctatcgttaaagaagcaattcaaaagggaattgctagaggagttttctcaaatgaatctggattgggttctgctccaatagccgcagcagcagctaaaacaaaagaacctgttgaacaaggccttatttcaatgacaggaaccttcattgacactattgttatttgtactttgacagggattgcaattttagttacaggaaaatggctagaatttgatttacagggtgctccgttaacacaagcatcttttaataccgtatttggctcactaggtagttttgccctaaccttttgccttgtcttatttgcttttactactattttaggatggagctattacggagagcgttgctttgaatatctatttgggactaaatttattaacgcttatcgcattatttttgtcattatggtcggcttaggtggtttcttacagctcgatctcatttgggttatcgctgatatcgttaatggtttaatggctttacccaatctaatagctctcctagctttgtcaccaattattgttaaagaaacacagaaatatttttcagagactaaaaatatcactaagccttgaacttactagttttatagtctgctcctaagtgatataatgtgtagatgaaaggaaattaggaaaatggcaacttctactgaaaacttacaacttgcaaaaagagggcccattattagtatcattgcctatataacactggcagtcgctaaattagctgcaggttattggtttgatgctacttcacttgtagcagatggatttaataacttatctgatatcttaggaaatgtagcactcttaattggtttacacttggctagtcaaccagccgactcaaaccatcgttttggtcactggaaaattgaagatttagcaagcctgattacctcttttatcatgtttgtcgtaggtattcaagtttttattcaaactgtcactaagattattaataatactgatactaacattgatcctctaggtgctatagtaggtgctatatctgctcttgttatgcttggcgtttatttctataataaacaattatctcaaagagtaaagtctagcgctctggttgcagcttctaaagataacctttctgatgctgtgacatctatcggcacatctattgctatcattgcggcttctctaaattttcctattattgatcgtttagctgctatcattattacttattttattcttaaaacagcttatgatatttttatagaatctgctttcagcttatcggatggtttcgatgattatcaattaaaacaatacgaaaaagctatattaacaattcctaaaatatccgctgtaaaatctcaacgtggacgtacttacggtagtaatatttaccttgatattgttctcgaaatgaaccctgatctctcagtctttgaaagtcatgccattaccgaaagagtggaaaaactactcagtgataaattttctgtatatgacatagatattcatgtagaacccgcttctatcccagaagacgaaattttcgataatgtttatcaaaaattatacaaaaacgaaaaaatcatcctagcaaaaattcccggttatgagacctttattagccctgacttttatatgattaatgaaaagggaaacattatcacttctgacatgctcactaatgctacaaatcattcattggcaagcaactttaaatatttcaatgtaaaatcaattagtcaaaaaacaaaacttgtgtcttatgaattggaaggtaaacgacatactagtatttggcgccgtaatgaaaaatggttcttaatctaccatcaaataactgccaagtcaagtccgtataaaacgagacgatatcaaatcacttcccttgattaatatactatttaatcagttactcttgataaaaatagcttacaaaaataaattaaaaagattgagaagaatctcggtctttttaatttgtttttatgtaaacgtttcatagccttgaaaattactttcagagtagtagactataatggaaggagtttttcatgaaattatacgttcaattaatggttattttaaccttttcattcgctggtgaggttctatctactatattcaacttacctgtaccaggcagtattattggattaatattactattcctagcgttaaaatacaaaatcatcaggctcaggcatattgatgccgtggggaattttctattagcaaatatgaccattttatttttaccaccagcagttggactgatggagcactttcaagacataaagccctatctttttgggatagctatcattatcttaggagcgctatttctcaatattctaactattggactggtatcccaatggatcaaaaagagatatgaaggagattatccagaaattggaggtaaaaatggcaactttaacgaataaccctatctttggtattatgttaaccgtatgggcgtattacattggcataaggatttttagaaaatatccttcccctgcaacaactccacttcttttggcgactattttattaattgcttttttaaaattaacacatatctcctataaagattactacaatggcggttcatttctaacgatgttaattacgccttcaacggttgtattggctattcctctctatagaacctttcatttaatgaagcatcacattaaaagcattagcattagcatcatcttagcttctgttatcaacacagtttttaccgcaatagttgctaagttttttggtatgaaatatttcttagcaatctcacttttcccaaagtccgtaactacagctatggccgttggaattacaagtaaagcaggtggattagctactatcactctggtcgtagttgttattacaggcatcttaacaagcgttttgggtcctatttttctaaaattattaaggatagaagatcctgttgctatagggctcgcgctaggaggaactgggcatgctataggaactggacaagccttaaaatatggccaagttcaaggcgccatggctggactagcaattggtatcacagggatttgctatgttattgtcagtcctttagttgcaggcttaatattgaaatgaggataaggaaagtaaacccaaaataattatgttataatatttaaaaatagaatttaggataaataattatgataccgttaaaaaaaataactgttggaacgattgtctgtctctcatttttgggtttaacagcatgctcttcttcaaatactcagcaaacctctacttcaaaatcaaatgtatcacaacataaaaatatcaaagctgaccacgaagaattacgtttgaaatttaataaagtaaagttaggggttaaagcaaataactttaaaggaggcactagtctcgctgaattaaaacaattatttggtggcgaaccaaatgaaaaatttgatacaccagcgggaaatgtcactcttaaaggctatcgttggaatgtcgatgatatctccatcactatacaattattaaacgatagtagcattgttcgttcaattagtaattttaagtttattcgtgatgccaacatcacaacaaaagattataatagtttaaaaaatggcatgtcatacaataaagtaaaagaacttctaggagaacctgatgatatttctcaagcagtttcttcagataaagaggaactacaggctgcatggattagtggcatccagtcgtcagacagtgatccgggaattaaccttacatttgaaaatgataaactcactaacaaacaacagcatggtttaaaataaaaaggcattaacgcctttttattaataccttaattacttattagaaatattttattacacaatggtttaatcttagtaccttaacttagccccttaatggtcatactaactaattatgatactaacttacacagatttcaaactaattcttccttatttgtcaaccctggttttacttatcagaaatgaggagaatcagtttgtgaggcaagattggagataaactaatataaagcctataacataaagctttatggagcatctattatccatcttaagggaatcgaacccctatcccaagaaccggaatcttgtgtgatatccattacactaaagatggtagtacatgttacattatagcatactttatcaacaaaaacaaaaagacttgctaaagcaagtcttttaattattataattcaatatcaccgaataagtcagccatagagaatccagtttgtgtttctggaagctcgtagtcgcgtttttcttgacgacgtggacgacgtggacgtgattgacgtttttcttctttttcaccttctgcttgcgctggacgctcttcaagagctttcattgaaagtgagacacgttctgcatctgaattaacttcaagaactttaacagtaacttcttgtcctgcagataatacgtctttaggattttcaacacgtttgtgtgaaatttgtgaaatgtgtacaagtccatcaatgccaggtaacacttcaacaaaagcaccaaagtcagtcaagcgttttactttaccttcaataacatcaccagcagcaagtttttgttcaacgccatcccatgggccaggtgtagttgctttaagtgaaagtgatacacgaccagcttcttcatcaattgaaagtactttaacttcaacttcttcaccaacagttacaactgatttaggtgaaacattgcgctcatgtgataattcagttacgtgtacaagtccatcaacaccaccaaggtcaatgaaagcaccaaagcttgttaaacgagcaactttaccagttacaactgaacctacttcaatgtttgagaaaacttctttacgtgctgcagctgctgattcttcaacaacttcacgacgtgaaaggatgaagcgattttctgctgcatcaacttctttgattttagcatcaaattcttgtccaacaaatttttcagtattacgtacaaaacgagtatcaatcattgaagctgggatgaaaccacgaagtccttcaaattcaactgaaagtccgcctttaacagcacgtgtacctttaacagtaacaacttcaccttcacgaccaacaagtttgtcccatgctttacgagcttccaagcgttttttagatacaaggaaagttactgtatcagtatctttacctacaacttgacgaagaacaagtacttcaactgtgtcgccagctttaacaaaatcattgatatcagcatcacgatcgttagtcaattcacgaagtgtcaagacaccttcaacaccagtaccatcgataacaacgtttgcttgaccgttatcaactgttaaaacttccgcagtgacaacgtcaccaggattcacttcgctaacactgtttagcaaatcttcaaattcattcattctaaaaaatcctccaacaaaagctagccgagctagcttttgataacaatatattttctcaaggtaacccgcaaggacaacaaatatctctttgacggtgtcaaacaaaagtttgatacctttgactggggtagctggattcgaaccaacgcatgagggagtcaaagtcccttgccttaccgcttggctataccccaaataatggaaagagagggattcgaacccccgaacccgaaggagcggatttacagtccgccgcgtttagcctcttcgctatctttccgtaacaacactgactattctaccacagatgttgttagcacgcaagctttttaaataaatattagcgattaagattatattcttcaataatatttcccatagcttgatctaaatttttatagaatccactcacttgctcacctttaatcacagcaaatttagaatctagctctgcaatttgacctacaattttttttccaataacgagttggtatccatcaaccttagttccattaactgttacttgagcgtctgaaatttgaatttcaattttcttatcttttttactcactattaactccaatatctctttttattgttttttattgtacacaaaatactaaaagcttgcaagagcaagcttttagtatagacttaatctactttataaatccacccttctggtgcttcaacatcaccaaactggatccctactaactcatcatatagtttgcgtgtcgctggaccaacttctgtctcactgtagaagacatggaagtcatctccgttttgaattcctccaattggtgaaataactgcggctgtaccacatgcgccagcttctgtgaatttatctaattcgtcgacaaagacatctccttcaatcgcttccataccaaacctttctttagcaaggtaaagcaatgaatatttagtaattgaaggtaaaattgaaggactcaaaggggtgataaactgattatctttagtaattccaaagaaattagctgctccaacctcttcaattttagtatgtgtcgctggatcaagatagataacatctgaaaattgtttctcatgagcatatttcccaggaagaagactagcagcatagttaccaccaacttttgcagctcctgtaccattcggtgctgctctatcatattctttggaaacaataaagttagttggtgttaaaccacctttaaaataactacctactggcattgcaaataccgtaaaaatatattcttcagcaggtttaactccaataatatctcccacaccaattaataagggacgaatgtataatgttgcccctgtaccatacggtggaacaaactcctcattagcgcgtacaacagatttaaccgctgcaataaatttgtctgtcggaacatgtggcattaaaagacgatctgctgttctttgaagtcgttctgcattttgatctggacgaaataactgaatagagccatctttagttctataagctttcaatccttcaaaagcttgttgcccataatggagagcaggtgaactttctgaaatatgtagcgttgcatcatctgtcaacttgccatcatcccatttcccatctttaaaatgcgaaatgtatcggaatggtaattttctgtaagcaaaacctaaattatcccaatctaaatttactgtcataaggtacctctttctttgggtttctaactattgtacgctattatcattattttttcaatattatttgtaaaattcagataaattaccaaactagtaaaaacacaaatgtgtttttacttaattttaactgagaatacttcttcgtcagaaatcttatcagatacaaaagagccattacttgtacgttcagaaaaactccattgacttaaatcaacatcgtaaacttttcctgttttagacataatctcaagtacgaaagtatctccttcatgattcgatactgaactaaataaatcaaattcaaaagatgaatcctctaaatatacaggtcctgctttaaaaacgcgatgcggtttggatttcaattcacgaagaacttgaagtcctcgattagcacgactagttgtggggataacatcaatggccattcgtttaagacttcctctatgagttaataaatataaacttgtggtgttagctataaatgcagatacgatgtgatcacgatcttttaaattcatcgcttttacacctgcggctttactaccgacgactggtacatcatttatactaaatctcaacgcataaccattataagtgacaagtataacatcctctaattggataggggcaacagtcacaacataatcctctacactttttaacttagcatatttagctgtttttgacttatatgtccgccatggactgatttcttgacgttcaaaacgctttatttgccctaagctagtgacagcaaaataagtttctttagtaaaatcatctactaattcagcataaataatttcttcatttgaagcaaagttaacaagattttgtgataaatgttcaccaacgtctttccatcgaatatcagctaattcatgaactggacgataagcaagattaccaaggttagtaaacatcaataaatgttgggtagtctttgcattgctcacaaatatcaattcgtcatcttctcgcttaccaagttcatcaacagttgatgcattgaaagagcgagggctggtgcgttttacatatccgcctctagtaacactgacgtatgtgtcctcttcgataattaaacttgcagtatcgatttcaatagtttcagctaattcttgaagttcagaacgtctagtattggcaaatttctttttgacctcacgtaactcacgtttcattacgttatacatcgtacgttcatcactaataattgccttaagcattgtgatttgttgacgaagttcttcttcttcttctctcaacgtcacaatatcagtatttgtgagacgatataattgcaatgtgacgatagcctctgcttgagcttctgaaaactcatagctgaccttcaaattctctttcgcatcagctttattctcagaagcacgaattaatgcaatcacttcatccaaaatagaaagaaccctaatcagtccctcaacaatatggagacgtttttcggctttttctttatcaaattttgaacgagcaataataatttctcttcggtgagcgatatagctagttaatattcttgatagacccacctgcttaggggtgtagtcatcaatagcaaccatattgaaattataattaacttgtaggtctgtatatttaaaaagataatttaagacaattgtttcatcggcttcttttttgagctcaatagcgatacgaagaccatctctatcagactcatcacgcacctctgctattcctggaactttattattaacacgaacatcatcgattcgttttactaaaactgacttattaacttcataaggaatttcagtaacaataatttgtttcttaccaccttttaaggtttcaatagcagttcgcgagcgaaccgctactctccccttaccagtctcatatgccttacgaatttcatcttttccttgaatgatagcgccagttggaaaatctggaccaggtagaaattccattaatttatctaatttagctttagggtgatcaatcatgtacacgacagcatcaatgacttctgctagattatgtggtggaatatctgtcgcatagcctgcagatattcctgttgctccgttgactaaaagattgggaaaggcagctggtaaaacagttggttctttctctgtatcatcaaaattccacgcaaagggtacggtattcttatcaatatcttgaagaagataaccagcaatttctgatagacgggcttccgtataacgcatagccgccgcaggatctccatccatagaaccattatttccgtgcatttcaatcaatgtctcacgatttttccaatcttgagacatacgaaccatcgcgtcatagatagaggaatccccatgaggatggaaattccccataacattaccgactgattttgcagatttgcgaaatcccttttcaaaagtattaccatctttattcattgaataaaggattcgacgttgaacaggttttaagccatcacgaatatccggcaacgcccgttcttgaatgatatacttagaatagcgcccaaaacgctctcccataatgtcctcaagggacatattttgaatattagacatatttttaattttctcctagttggagtggcttagtattatttttccacttatttgaaatgaatgattggctctcttgtctaacgcatacaatattacttgtacactataaaacatgaataaccaaggctctttattaaaatactgtattctcttctaaagtaaacttgacattatcttcaatccattggcgtcttggaggaactttatcacccatcaagacattaactcgacgttctgctcttgctaaatcttcaattgttacacgaattaatgtccttgtctcagggttcatagtggtttcccacaattgatcggcattcatttccccaagccctttatatcgttgtaatagtgagcctttaccaaatttttgtcgtaattcttctaactctatatccgtccaagcatactcaacaatttctttcttaccttttccttttgacattttatacaaaggtggcaaagcaatatagacatgtccctcttcaacaagaggtctcatatagcgataaaagaaagttaataatagtgtctgaatatgagctccgtcagtatcagcatcggtcataatgataattttatcataattaatatcgtcaagattaaaatcaggaccaacacctgcaccaatggtatggatcattgtattaatttcttcgttttttataatatcagccatctttgccttagctgtattcaatacttttcctcgcaacggtaaaatagcttgaaactttctatcacgaccttgcttagcagagccacctgcagagtctccttcgactaaatagagttcatttttcttagcattttttgattgtgcaggggttaattttccagaaagtagacctttatcttttttcgactttttcccattcctactttcatcacgtgctttacgtgcagcttcacgcgcatcacgtgcttttattgccttacggattaaattagatgctaaatctccattttccataagaaagtaagttaacttttcagaaacaataccatcaacaattggtcgtgctaagggacttcctagtttatctttagtttgaccttcaaattgcaagtgctcctcaggtacaagaatagataaaatggctgatagcccctcacgataatcagaaccttcaaggtttttatctttttctttaagaagtcctgttttacgtgcatagtcattcatagactttgtaatagctgatttcaagccagtttcatgtgttccaccatctttagtacgaacattattgacaaaagaaaggatattatctgaaaaaccatcattatactgcaaagcaacttcgatatgaaattcttgttcttcaccttcgaaaaacatgattggtgtcaacgtttctttatcttcatttaaatactctacaaaatcttgaacaccgttttcataatgaaattctagatgctctgcttcttctgaacgattatctgttaaggttaaagtaacattttttaagagaaaagcagattcctttaagcgctctgcaattgtattaaacttaaaatctatcgttgaaaatactgattgatctggcataaagctgacagaagttccagattttgattttggtgccgtgccaatttttttcagagttgtaacgggcttaccaccattttcaaaacgttgtctgtaaatagctccgtcgcgaatgatttcaacttctaaccaagaagacaaagcattaactacagatgatccaacaccatggagaccacctgatgttttataaccaccttgtccaaattttccacctgcatgaagcaccgtgaagatgacttcaacagtaggttttcccatagcatgcattccagttggcataccgcgtccatggtctgtaacagttatactcccatctttgttaataataacatcaatgcgatttccaaaacctgatagagcttcatcaactgcattatctacaatttcccacactaaatgatgtaaaccagttccatctgtggaaccgatatacatccctggacgcttacgaacagcatctaatccttctaagacttgaatagcatcgtcgccataattcgtcactgttatatcttgtttagccaaagtgacctccaaattttttcatcttttttatattacaagttttttgctgtttttgcaaaattatttttttaaaaatagcaaaaagacttttatgcttatgttataataagggtatgaatattataattatgattatcattgcctatctgttaggctctatccaaactggactttggattggtaaatatttttaccaagtcaatcttcgtcaacacggtagtggtaatactggcaccacgaataccttccgtattttaggtgtaaaagctggcattgtcactttgactattgacattttaaaagggactctagcaacacttattcctatcatattaggtataacgacagtatctccattttttatcggtttttttgctattataggtcacactttccctatttttgcacaattcaaaggtgggaaagccgttgctacaagcgctggggttttgctaggatttgcaccttcttttttcctttacttattagttatctttttattaacgctttatctttttagcatgatttccctatccagtattacagtagctgttgtaggtattcttagtgtcttaatttttccattagtaggctttatattaacggactacgactggatatttaccactgtggttatcttaatggccctaacgattattatccgacatcaggataatatcaaacgtattcgaaaaaggcaagaaaatttggttccgtttggcttaaacctaagtaaacaaaaaaataaataataaaaaaccgctagtagcggttttttattataaaactaacaatgtttcgagagtagatttcccttctaatttaaccaatcaatctcatttattccttcttcttctaagaaatgatttgttctagaaaaaggtctgctaccaaagaagccacgataagcagataagggactcggatgaggactctcaataatatgatgaataggattatcaattagcgactttttctttcgagcatagccaccccacagaataaagactactggtgtttccttttggttaaccactttgatgacagcatcagtaaaaggttcccatataagcccagcatgaccattagcttggtgttctggaactgttaaacaagcatttaatagcagcactccttgttgcgcccatgatgttaagtcatgatgtgaacgtgacccgatatcttctgctaattcttttagaatattttgaagtgaaggaggagctggtaaattgtctggaacagaaaatgagagtccttgagcttgttgaggtccatggtaaggatcttggccaataatcactacttttacgttttctagtggtgttatctgtatggcattgaacaccttatctcttggaggataaacgattccgctttcgtaaactgcatccataaatgtattaattttattgtagtaatgattgggtagttctctttttattaaatcatgccaactagaatgtttcatttataactccttacttttagatatctgtattactagtatagcaatattttataaaaaacgttactgctttattcattcaaagcagtaacgtttttttattaatcttcgtccttaagacctagagccaaatcagataaggacactggtctagaattttcttctttcaaagaagtatttataatgtttaaagaagtataaacatcaataaggattccaaatacatgtgcacgttcatcacctaaaattgcttgaaaaaccgtctgtgattgacagaattctaaaagattatctaagcccttaatccattcttctacaatagccagagccttattcataactttaaatgacgattcatcataccaataaatagaacgaatcagttttttttgcttactcaaagcttctattttagaaagtatctcacctagttcattctgcacaatagcaatagaaaaatgtttccccagtaaagatggggttttttctactaatataatttcatcacgaaacaaggttaaataatgaatactgactaacaatttttgaattagcgcttggtgatcgtgtgtttcagtttctctcatactcaaccatccttactatttctgactggtaaaactatacgtagcttactttaaatataccatatcactattgaaatcgcaaaaataagatgaataattttataaaataaatattataaggttttaacttcgtctacaaataattgatattgactttgtaacaaatcattagcctcttgagtaaaatgcaatccatcactagttaaatgataatttagattaccatcctttgataaaaatctattaatatctaacagtggaatctgattttgataacaaaattctgttagccattgattgattttctcaatatctgcattattgacagtttctctaaaaagggtgtaagcaatagttgtcaatctcatctttattttattctcagctaataatgagtagagtttttggaaattgctgaatatttcttccacactataacctgtaatgagatcatttacccctatagaaacaaaagcctctgttacattagctgtcaaaaagttaggtaagttttccaacatcgttgctaatgttacaccaccttgggaataattatggtaactttctagtgaggtagatatcgtttttgaatcacctaaaattatctttgaagcttctctattgaacaaacgactatagccttctttataaaaaactttattctctttttccctaatggcataatcgaaaaagaggtgaccgatgacgtggataaaatcatctctcgtatcaacatctaatgaaaattcctttgccatttgataagcatatgtcctagaggtgaaaaagcttttttcccttaagtaagtttctttattagaaataaaaatagcgccgttcggatagtataaaggttgtaaatcttggcgacgataacctttatctgctcccaccatatctatagcatagccttcatcagataatgttgtaaacagactagggtgtttctcaacttcagaaaaacttacaacattgtcaacatcatgtgaagaataatactccattgcttcctttatatgccatgattttcttagtggagaagttacttgaagtaacacaaactcctgattatcttcatagtcagataaaaaatcttttaacatatcatacgaagttgcctgatcagttgaaagttccggttttctcatcaccactgaaataccgcgttctaaacaaatctctctgtacaattctgaatctgtactaacaaaaatatctttcttatcaaacattccagattcaattgcagcatctatagtatggaaaatcatgggtttaccagataggaataacatattcttatctggtaatccttttgaccctgatcgcgcaggaataatacaaattggcttcataacatatcctttattttatttttttggctggaacccctacataggttccaggttctataatatcttttacaacaacagctcctgctccaattgtcgtacatgatgaaatatccaaggtttgaataataacactggcactacctacataaacttcttctctaatataacaaagaccatttatggtagcattaggtgctatattacagtgtgattctacaacagtatgatgttcaatgagcgctcctgtattaacaacattgttatcaaacagcttcactttagaacctataaaagccccaaaaccaataaagataccacgtccacaaatactatctggtgtcaatactaaagcattgggactaatgatgttaataataaagtcataataatcctttgctacatattcaaatagttctttccttttagcattatcacctattgtaataaatactgcatctattgagccatcttcaaggtaaggtagcacatcataaagttttccaagaacaggataaccatcatgctccgtaatatctttatcatcaaaaaaacctacgaaatcatacacaagaggatcaataaccggagcaatcgcatcagcatgacttcctgcgcctaaaaatgccaacttttttttcattttagattattctcctttaaatcataaaatggttgggaaattgaaggttcatctttcaaatacagctttattgcttcatatgcaatagatgaagcattctctttgtagtagggattgtcaaagttggtcacttcattcaattttgataatccctccaatacagaggaggtttcgactggtacacttactacactttctccatgtagcctacctttttggcgatcaccaatattaagagtaggtttcatcaaagaaggaacttctattaaaccagaagacgaattaccaatcagtcctagtgaatgacgaattaaggaatgataaagttgggttgataaagaagcaaagcaatgactattttcatgatttgtcaaataagtattgatagcctttgcaatatcatcagaaccagtatctgaattggatcctataaatagacactggacaccaaacttagaaagggctgatagtaccgctttcatctgctctccagcactttttccttgttcaaaagtaacaggatgatagagaacaacaaaataggattcctctagtgcaatacctaattgcttttctattgcttctttggttagagaagggattgatagagcattttccactccgagagctcctgtgttaattacaaattgaggttgttctcccatctgaatcacacgttgacgaaagtcctctgtagagactaagtgtaggtgactcatcttagtaattgcatggcgaatatactcatcaaaattgcctaatgaggtctcccctccatgaaggtggcatactgggacattataaatcaacgctacattcacaactggtaacatttcataacgatcccctaaaatgatgactagatcatagtcttccttgtcaaaaattttggtcaatcctagttgtaaatgcgccattgcagtagatacagttcttctgtcagtatcataaagatgtaagggaactttataagcaatatcaaaaccgtcttcttcaatttgacgataagtatagccgtacttttcttccagatgcattgctgttgcaataatttgtaagttgacttctttatcttttgacaatctttgaatcaatggcttcattattccgtattcagcacgcgatccggttactaaacaaatttttttcatcgtatcccttctatatatagtaattacataatcttagccgtgtaatacatctgttgccgattataattaggtgttattataactcgggcaattgattttcaaagcgtgaatcacgaataacttcatcctcttcgaaatcatcttgcgcttcttgtcccaagatgtcataccagttcataggagaaataccattacctgggcgcttcaccgtaatattttctattgaataaatatcgccttttttaattggttttaaagcaacgactgatttacgagcaacaatcttatttttttcttctactggatctgggattttttcaaatctacctaaggcttgttcaacaatgcgaacccctttaactaaagcagctaaaatatcaggtgttgcactggctttatgatccggaccttccatattagtatctaaagtaaagtgtttttcaataacttctgcacccattgctgctgctgcgataggtacttctgatccaattgaatgatccgaataacctatcgttaaatctttaaattcatctttcaaagtatgaataacgtttaaatttagagaggggtaaggtgttgggtactctgttgtacaatgtaaaatagaaatgtcggttgtaccattctgacgtaaaatattcaccgcttgatggatctcttccattaccgccatacccgtcgaaagaataactttcttttgttgcttgccaatcttttctaagtaaggtaaattagtgatttctcctgatggaattttgtaaattggcatatctgtagaaattaagaactctaatgactcttcatcaaaaggtgttgaaaaggtctccacaccttttgaaattgcataatcacgcatttctaagtattcttcaaagcttaactctaaacgtttcgtcatctcaagttgactgtctgctgttcctgtagttgctttttgatattcagctttgggagcaaatttagaaataagtttctcagctttaaaagtctgaaatttaacagcatcaacaccacaagacacggcaacatctaccatttttttcgcaagattaatatctccattatgattgcaaccaatctctgcaataatataaaccattatcttctccttctttttttacccaataagtctaaaatgactttttgaaaaacaatgctatatactataagaataattattcctaaactccatctaataacgatattacctaggaacatgttcattaacatagcataactaaatactataccacttaaaataatgtactgcctaactgagacatctgaataatggtatttaactttcgaaacaatatgatgaaaaatcaacaaggctaaataagatattattgtagccatagcagcgccataggctgcataatgaggaattaatacaaggtttagtaaccaatttacaccagcagctaataatgtcccaataggaatccatgtcgtattagcatagaagaattggatatttacaggaaatgtatagagaaagactaaaaaatagctgacaataattaaagaaataaattgaacactactactatacttgtctcctcccattatttgagctaactcaggaaaaacagtcaaataacctaatgttaagaaaactcctaaatagagataacggctaatataagttgaaagttgcagtaatttttcttttctagcatcaaaaaaccatggaatccaagccatattaatactattcaaaacaatctgaataatcattccaagcgaataaccgaaactatacattgcaacttctttagtactatataagcgagctagcataatcctatctaattgatttaataactgatgtcctaacaaatgaaaaatcaaaggaatagacacagtgacaatgaaccgaaaatacttaggattgtaaaaagatttgctatgataataaatataagcaaaggcaactattccagttattatagtaggaacaaaagctccaaaaaccctagataaaaagtcatcggaccaatgaaaaattaaaaatagagatagtgcaacagatgaaactgcattggctaaggatagtattaaattagccaagctcctctgttgttgtataaaatactgaccaaagaaagtcaccacatagttagcgtaactttgacacaccattaataaaaaaatagattcagaaaaaccaactaatggtgcaagaaaacttctaaatagaaaagctatcaaaagtacaataagaaaccatatattacctacagaaaaggcactcccagagtagcttttaaactcttctccatatttgactcgagccgaacttaaagaaccgctcgtctgaagaccaataaacagagtaataattcccatccaagcaacatataaactatattggccataaacttctgttgagatgactcgagtgtagatgggaagtgtgataaaggctaatccttgcaccaataaattcccgagtgtataaataaaaccagattgaagtaatttcttagtattcatttaatatccttcagatctactaaagttatttttttatcaacacaagttaaaaaatccagcgcggtggacgaatgtgttatcccaaattcgaaccgtcctgttaacatcaactctataatttccatagggatatttgatggtaatagctctaccggcaatttggaataatctactacatctctaggatgaacttttaaataaacattgtaccctaacgttctatattcctggacaatatcgtcaaaataatcgtattgctcttgaatactttgaaacctctctgtaggtgttttataacatttatcttgtgcaagtggctgtgtcaacaataatactgactttggagttatagttaatggttttgttttaaatattttgaaaatcagtgatttttgctctttgttaagactatcaaataatttttttctcggtagttctttatatttcttactccttatgtcatgaggtagccccactaaagaattaacctcaattgagagacaatattttgaaaaaccatacggaacatactttttaaataagtaagttttaattactcgttttacgacagaaccacccaagaataacttggcttgaaaacagttataaccatcttcaattagatgataatttttacccaaatacaccatatagcgacctattaaagtatcatcattaaatagatagacttgtgtatctactctctcaaagtagtgatttaagtctgaatctacaagctccatcacttcttcaatatttttactttgtaactgctcccgataagcaaactctttaactgcttccgtccttattccctgttcatttaatgtttttacccaagtttcataattcgtgatagtgtcacaaataaatattctagtattttctttatcttttaactttattatagtaatcagtaaatggtataaagtatgacacacaaaattattcatttatttatctttttctttcttttacaatttaatattttaaaatgcactacacaatactttaaataatactttatttttagtagcatacgttgtttttttataaaatcaaaaatagtttttttatattcagttttcagagtatgaaattccttataaaaattatttttatataactctatcaaatttacttccatagttttaattaaagctctctcactttgaaatactaagtctggatacttttctaataaataaattctttccttaagtgcttctacagcatgtagccttttaatattgtaggaaccagtcattatgctattttctctaatacgatatgcataagtattatatctaaagaaaattatatttttggctttcaaatataatttataggttaaaaattcatcttcgtgtaacttccctactggatagcacagcgtagaaaataattctctcttatataatttattatgtgctacagtaaaaatagctctataggcatcataattataaatattttgtattgcttgtactggactaatagtttctatcatttcatcttctaaaacgatatttataatatgttgttctcttttttcaacataacaccctaaaacaatttctgaattatatttctcgctaaattcaaccattctctcgattgcatcttctttatatagataatcatccgaatcaagtaaataaatataatcgccagtagctctactaattccataattacgagcatctgataaaccaccattatttttgtgaaaaacgaatatacgcccatctatttctgaataataatcacagatatccccggaattatctgtagagccatcgttaactagaataatttctaaatttgaataagtttgagctaaaacactttctatacactcgtttaggaaagattgaacgttataaactgggataatgatactaactttatccattccttgataacctcaaattatatatttttcttacaatagtgaaatatcttatagaggaaataaataatatatatttaaccttctccttcacactaatcctattattaaagagaatagtcttaaaatattttctatatttttttctgtaataatcaactgtatcatataatttaaaatcaatcatcttcccacatatatctattccaccaaatacttcattatatattacagcagagattaaagatgtattatgtggaaaatttagatttataaatacaatattattttgaattgcctcaaaaaaatacaacattctctcattgaattttgtcctagtagtactattatcgctaaaatacaccactgcagtgacaatatcacaaactgctatttttgaagcgcaagatataagcttaaaagttgtatccatatcttcatgaatttttccttctggatatggattactcaataaattacttctcggatataattttgctaacggggaaactccataagttttcccataatacatttcttccaacgccacctctaaagtataaagtttaatctcttttaaatactgtgaattaatactagtattgtaagtattgttgaagttaccaatactagttaaaacaatatcggcattggtagctttctgtatgttgtacataacctcaattgaataaggaagataaacatcatcactgtctaaaaaagcaatccaatctcctgtacacctaagtactccgttgttacgtgcaactgattggcctctgttttcttgatagaaatattttattcgcctgtcttccaaaaaatacttttcgcaaatatcccctgtgcgatcactagagccatcatcaattatgataatctctaaattctgataagtttgctcaagaatactatctagacatctcccaatatatatttctccattatatacaggcactattattgaaattaattccattctttactcgctctttttaaaccttgctaccttccaaagatagctaaaacccaacaaaattttccacccagcctcttcactctttagtgtaggtattacccctaaagtagtcattttcaaagcctgtatgttcatttttatctttatagctgaccaccagcgatcaaatatattaggaaaagacattacatacatatatgaattttctaatgaaaaaatagtccctttgaaattttttctccataatttaaaaatattagaagtcaaaccatcttctaagtagtcaaaacaatagattttcctattttggggacaaaagtatcccttttttgataaatatatatacattatttcttctgataagaaattctccccttcgaaacaaggaaattcgaaatctactaaataagcattattaataacaatacaagtttcaatttttaagtgatatttatattttaaatcaggaatattaacttctaatattttgggattcaaccaattattaccttggtttaatgaatatcgaggataaacaaggcctacatatctattagacaacgttaggctctctaaatctttaaaaataatttcaactgcatcttctaataaccaatcatcactatctacacatacatgataatcacttggttgcatatatctcattgctagattataggctgaatgcttaccgccattacgtttatacagatatacaatactaactttattctcttttatataattacttacaatttccttagtactgtcctcagaaccatcatcaacaatcaaccatataaaatttttatttgtctgattacatagagaatcatacagataggataatcggtagcctctgttaaatgtaggagtaaaaatatataacatttcgtcctttctattacaataataactatttctttaactttagaaaccttagaagcattctataagtaccatatccaaataaaaaatcaattatgagccttactctaatctttagagaatctgaaataaatgaagaacttttccaacttccttcgtaatgatgtatagaataggtaacactagtcagacaatcaaccttacctgttaataaattctttggattaaaataatttctcggatatattgttatatcatcaatcttttgaataatattcttattcttaagccctctgtttatcaataaattagttgtaacctctacacatgtcttattaagagaagttaaatcacttttgtcatatatagacatatttgattttaaaaagtgatgtcctttaacagcgccaattattaatcctgtattcacatcacaactaatctcccttgctagaaaacactcatgaatcctcaaaggatctaaactttttaaaagctccacatcagtatctagatagaaccccccataagtataaataatatccaatcttgcatagtcagaaacataagcaaaattcttcttagtatatgcttctctcataaaaacatttttactaacatcataattatgctcattccattcaataatttcataatccggacattgttctctccaagtttttatatatttctttaaattatctggtaagggatttcctccaaaccaacaataatgtataactttaggtatcattttccttccttacctcctgccatatcagagcaaatatgtcatatattattcacaatagtaaattccttttttataggttcgataccatcacaaaatattttaccaaaaactagccaactaatattcattaccacactgggataaaaactttcagtaaataatattatagacattataaataggagtagttgaagttcaattatgattatctttttactatagatataatagattatcatacaaaacatggtaagtactacaccatacatactcaataacatagagtagctattatcaaataggacacttgtttccttaaaactatttccaaaaggagttaaaccatctacaagttgtaaatgagcatagtgtaatctacctgttaaaagaacatctaatttttgaacaaaatttgaattaaaaaaaattgtagaactcaaaaaggtaaatactaataaaaaaaattgtacatagggtgctaatttcataaatactctttttattaagctattctttgtcacataaatgagtacaataaataaaattacgatataataccctgtccttgaaaaagtatattggtacaataaataatttaatgttaaaaataaaaccatcacaacaggctttagtcgtttataattgagtacaatatacaagaaaatagttagagcaaaaaaattatgaataaagttaggatgaccaaaacctaagtcacttctcagaataaattgtccatccctataaaaattgacatacttaatttctattaaatctaatttcacaaaaatttgatttaatagaactcccaaaatacgcgatcctattattatagagaaagctttttttagagagatgtcctttaatgctagaaaaaaaattaaagttaatataaaagtaaccttatgaacaaagaataaattcaaaatggtcgcgataaataataaaaagatgatcacgagttttcttctttcaaaataaaggctatctaataaaaattttattccacacagtaaaattgcaactaacatcactattttgtaagctgagtttccctcgcctaaacccagtgatttaaaaaaattaactaaaaatattgcaatataaaataaagagtttttattgattttcatcgcacaactcctttaatattaccttaaattcttcaataaaattactactattagtttctaaaaacggacgattcatcattccctcatagactacattttgtaacctttcaatatctacaacgatatcaaaattatacattgtttttaccttattaacaaagtccacctgatgattattcacatgctctccaaactgttcttgtctaggaaccacaatagttttttttcctttagaaactgcattcataaacgtcgctgggccgccatgtgtgataacaatctcagcttctttcatgtaagagttcatatcatcatatgagagaaattttgaccactgacaattctgaggttcaaagtctgagtaacccgtttgaatgaacacttcttgatcaatagcacctgtcccttttaatctatcaacttctttaataagacggttgaactgctgttcatgtgtccccactgtgacaaaaatcattaaaaaattcctcctaaattaattgccttaggataaacttttttcatttcttcccactgaacaataaatttatctgttacaggatacactaattttcctgtcaaagttggtttatccatcctgtcgaaaacctctatgtaaacggtcttacaaccaaataacttaccaatataaaagaatggtactgctacagcggcaccagatgatatgataacatctggtctttcttttctaaggaccttaaaagctagaatagtattttttaccaagtttttgacattacggtttgttggaaagaagcaatgatatacaatctcttctcttagaatactcctagcatcttctttatcaaaggttacccaaaacctatcttctttttcccaaatgggtttcaaaaggttcaagtgtgctagatgaccaccacttgaaccaaccagacaaattttcattatattcctttcaaaccttacctttacttagctcctgtcccgagtaaaactacctttagtgttaggagaataatcttaatatctgaccaaatagaccattcattgatatattgaacatctaactttacgatttcatcaaaatcagtaatattatttctaccagatatttgccacaaaccagtgattcctggcttaaaactaaggcgtcgcttctgcgttgaattatacttttcatattcatcaactgtgggagggcgtgttcctactaaactcatatcaccctttaaaacattatagaattgaggcaactcatctatgcttgtttttcgaataaattttcctattttagtaattctaggatcatcgtctaacttaaacattagccctgtcatttgattgtgaactaataaatctttcttaatttgttctgcatctactcgcattgatctgaatttatagaatctaaaaatcctaccattacgacctactctattttgagaaaagatagccggtccaccatcttttctgatttgtggaactagaaaaattgccacaatgccacatatgagcaaacctataatagcacccgtgatatccaaaaatcgttttgctataaggtgactatatttatagaatttcatagaatatgtaataacactatatccttcaaaagtttggattcgcttttctcctatattatcaaagctaagtgcctctacattaacattgacaatcactcccattgcttcaatgtcattaataatatcttgtatttggtatttaccaaataattcaatgggtatgttaataaaagcttgatcaacagttaagcaggttaactctgaagtaagagcatctttgtttattatccttaacgagttatgtttcaaatcataacaatccttttcagaggaatccaagatacagacagcgatataattatggtcgtatttattcctaaaggtcatttttgataaagaatccttattcgttatcaaaacaactttggtatctcgtgaaaacttagcgtaagaatattttcgataatattttaaaaatgaattcaatagatataataaaatcgaattcatagcaataaaagtaaaaaaggaaagtcgtgtcgttgtaaaagagtttttaaaaataaaaaataatgaacttgatatgaaaatatagtaaaagctgtatttcaataccattttaaactcttcaagatagccacgactccaaaagtctctgtaaaaatcagaaagataaaagacaatataatgtatcaatagaacaaacaataaatctttattgcttttaaaattgggagtaattaatgttaatgtcaaacttgcagaaaaataaaccacaactgtttgaatcatcgctataataatcttttgtatattttctttttctttcaatacaagagccccttacttcctttttctatccctttttccgtaatttccataatcgccgtaagtagcaacagattcattaactttattaagaataatacctaagaactttgaaccactttgttccatctgttcttttgctttttcaacataattacgttttattctgcctgcttgggttactaaaataaaaccatcgcaagcattagcgattattgcggcatcaacaactaaaccaataggtggagtatcgatgataatataatcaaatatatttttaatagcttcaatcatcttattaaaataagcgttctgaagtaatgctgttggatttggtggtactttccctgaaggaacgaccatcagtctaggaacattggtttcacagataatatctccaagatctgcattacctgataaataattcgtcaagcctttaatagttccagttgctttaaaggttccagacataacagagttcctagtatccgcatcaattaataatgttttaaatcctgcttgagctaaagataaagctaaacttgttgaagcagtggattttccttccccttccctaacagaggtaattgcaagaattttattttcctttccactaaactgtatgtttgtacggatcgcattgaagtattcttctgttttttttgcttgtcttaacttgctatcaactatttctaaacgagtcattatattctccttaaagtttattcaaatctggtactatacctaaagaagtaagtcctaggaccttttcaatatcttcttcagtattaacacgatcatccaaaatacccataataactaaaacaatagttgataatcctgcaccaacaataaacccgattagtacattctttttaatattaggagaagatggtgctttaggtaaatttcccttctcaagagtagtgatatcctctacttgagtaactgccttgatttttgaaactgctgcttctctaactgaatttgctaatttttgagacatttttggattagcatcttcgaccgatattgaaataacacgtgtatcttttaaaatagaaactgttattttttgcaacaactgagacgaaggataattcaatttttcagaagaaataactttttctagaacgtcagtagacgtaataatctccttatagtcatttgcaagaaaactccccgcttgtagatcttgtgcagtaatactattattaggggtattagggttaatgacatatatccttgttgaagaagtatattgtggcgtaacaataaaaagactatagaaaagtccagctgttgcaaatgcaatggcaacaaatgtgattaaaaatttctttttccacaatttttttaaaaggttgaatatatttatttcaacttctgtattagctattttattcatgaaatctcctaaatgtaatggttttttaatatagattgagcattttcaataaaaagttggttagcacgttctttaccgaaatctctacagataatcttataagcttctgctaaaaatggcggtctaacatcaaggttatgcatatcactcgctacaaaatgcactaaattttcctctaaaaaataacgggctcttttcttaaagcgtttatgcttatcattaaaaagtttttgtttcaaaatatgggaactatttatttgtgtgtaacaccccatattaataatttccttcacccgttctttttgattctctaaagcgttatacctctctatatgcgcaacgactggtgtaataccaagcattaaaacatttgacaaagctgtatgaatatctttccaagaagtttgcatagaaaattcaattaaagcaaatttcgtattgtttaaagttggaatttgctttaacttcagtttttctaacatatcacttgtatagtacaattctccaccatataagatttgaagatgttcaaatcttttttccgcttcgtgtttaactatagaaaagtttttgaagataatatcttcaggtgtttcaaacataccttttcttctatgtgatgtcgaaacaattattctaacaccttgtcgataactttcttctattaaagataaactctcttcaagcgttttaggcccatcatctacatcaaaaacgatatgagaatgaatatcaatcattcttgttattcctccattgtgttcttaatttttgattttgcattagataagctagattgatcaattgacatcatataaagttgagctcctggcattgcatatgaagggagttcacccgttgaaccatgaccagttaatgcttgtgactcgacagtgaagcgttgtccagttgacaattgattgttaatcaaatcattaatgttatcaatagtcatattagtttgaacggacgtttggagctgtgaggtaatgctatttaattttgttactgactgactagaagctaacttatttataatagctgcaatcactttttcttgatttctacctctatcgttatcgcctccttgtagagaataacgttctctaacaaagcccaaagcctgctcagaattcaatgttacttgaccaacagggaagtcaaaattaccatgtttacttgtaaaagcttgatcgttataaactgtcactcctcccaagaggtctattaattttaaaaatgatgaaaaattaattctagcataataatcaaggttgatgtcgtaaaggttttcaagtgttttcattgatgtctcaacgccatacaaacctgcatgggttaatttatcatattgattgcccccaccatctggaatttttacataggcatctcgtggtgttgtcgttaacaatactttgtgggtattggtattaaccgtcataataatatttacatcagatcttgatactgttgatatagagccaaaagtatcaataccgctaatatagatattaaataccccttctttatgattagtatttttacgattaatttttttcttaattttgtaagtataaatcgtttttatctgcgatttaaaatcaggggtgctaagttcaattaagctaacataagcattatttaaaaccatagcctgactatcaccacttttaattctattgtatgcatcctggtaagaatctgttttttgtggtgtaatagagattcctttttctgattttatatgttctatcaaatcagtaatatttgaagtatcgtttttaactggtgcggctaatttgctgacagcttctatattggttattttagaatcttttggtacaactacactcatctcaatttcagagtatgaagcagttttatttagattatttgtcaaatcaatggttgacttaaatccatataaagtagtagcaacgaaaatagaagctaatactaaaattatagttgtaaaaattctagctttattcttaatacaaagaaataaacttactaaaatgattaaaacaattacaactccataaatgacgttcaggtgtctaaatgccaaaaaatggtgacgatacataagaaataatgagactacacttaacaaaataaaaatcaccaaaagaaataaattaatcacccgtagaggtgtatgtgagtgtttcttttggtgacggcgcgaatgattagacattgtaattctccaatacttaaaaaaaccttaattttacttggatattatatcatttttcaatacaatattcaacgaaagtaatatggaataatctgattatattagctaaataacattttcaattgatctatattgataatttagctgatctaattgaatttatttacattctagtttaaactagagttatgagaattcaacaattacaatatgttattaagattgtagaaactggtagcatgaatgaagccgctaaacaactctacattacccaaccttcactttcaaacgctgttaggaaccttgagactgagatgggtatccaaatttttattcgaaatccaaaaggaataacgttaacaaaagatggtatggaatttctgtcatatgcgcgacaaattctagaacaaacagcacttcttgaagagcgttataagggtgataatacaagtcgtgagctgttcagcgtttcttcacaacactatgcatttgtggttaacgcttttgtagctctctttaatggcacagacatgacccaatacgaactttttttacgtgaaactaggacttgggaaattattgatgatgttaaaaatttccgttcagagattggtgttctgtttcttaatagctataatagagatgtattaaccaaattattcgacgataattccttaattgccacaactctttttactactacacctcatattttcgtgagcaaatccaatcccttagctaatagaaaaaaattaaatatgaaagatttagaagattatccttatctgagttatgatcaaggcctgcataattctttctacttttctgaggaaatgatgtctcaaattcctcacccaaaatccattgttgtcagtgatagagcaactctgtttaatttaatgattggattagatggttatacagtggcaactggtatcctcaactcaaaattgaacggtgacgaaattgtcgcaatccctcttgacgtggatgatgttattgatattgtctatatccgacacgacaaagcaaacctttcaaaaatgggacaaaaatttattgactatttattagaggaagtttcgtttaatcataaaaataaacagtcctgagattgtctcagaactgtttttaaattactcaagtatatttataataagcttgttaaccgtatcgtagtgaaaattaacagtatcatactcaacaccaattacctttgccaagaagataatctggtctaaaaatgcttgagaagaaaattgagttgtacgatatagttcttgctcatcaaaaggtttaatcaggtgagccaaaggatttctgactgatttttcgaactgtcttaattgaatgatggtcgatttcacttcttcatcaaggtcggttaattgtaaacattctgccaggcttttagaagtcaagcgactatcgtgccacctttcagagaatgccaaaaggactgggtggtttgactcctttaattctttaaacttccaagtatcgtagtgatcatctcttgcattatggatgtaatcatgcaagtgaggtacttcttgtgcaagtaaaatcataaatagacgatataaaataggactaacactacggacaaaatctatgattaatccgttttttacttttgcttctaaatccatgatgtaatttgccagcaactctaaatcatacgggttatgcaaaagctttatattgtatttttcttgtaatataacaacttgttcttgatgagcaaaaagaaaatcaatgtttaactctcgacgctctttcatcatttccaataaaaataataaatctgagtttaaaggaccatgtttttgtaataataagaaagcattatgataagaatactgatccactaatactttaagagcagttgaaaaatctgtcatttctatcctcattcagaaataagtgtttcgagcccaactttcatcatatcagtaaatgttgtttgacgctcttctgcacttgtatcttcttctggattattcaagttatctgaaatcgtcatcatagcaagagcattaacattgtgttgagctgcaagatagtagagagctgctgcttccatctcaatagcatgaacacctagtttacccaaggccatattacgatctggttggtttgaataaaacacgtctgaagataatacactgcctacatgagttgtaatatccatttcctttgcgatgtgataagctttatccaaaagtttaaaatcagcaatttgcggaaaatcaaattcaggccaatcattacggataatattagaatttgttgctgctgcttgtgccaaaacaagttcacgaacatggatatcaggattaatagcacctgctgttcctacgcgaatcaatgttttaaccccataatcaacaattagttcgcgagcataaattgaaattgaaggcatacccataccagttcccataacagaaacacgatgtcctttataggtacctgtataaccaaacatattgcgaactgtgttaaaacacaccgcatcttctaaaaaattctcggcaataaatttcgcacggagtggatctcctggaagtaaaattttatctgcaatttcaccttgttttgcttcaatatggattgacatataaactcctcatttttcttataaaataatcataggcagtagcaaaaagtactgctatagttaggggaacaatagttataacagattgaccagtaaaagatatgactaaaccgacagctgtcagtggcgctctcattgtaatagctaaaaaaatagctgcaccaaccaacatactggttactatcgatatgtggggaagtaaaggaatagaaatactagctaacaaaaaacctaaacaagcaccaatggaaaaagatggtgtcagtataccgccataagcaccagcgtaaagagtggataatgttgctatcatcttgagaacaactaaaatagcgattaagctaactgtggtccctttaaagacttcttgaactagggcattaccatttcctaaaatctggggatagacgattgataaaacagatactatcaatgacactactggcaaacttaacaatatttttatatttttaatacgtctctctgtcactttttgatttaaatatctaaagctaatcgcaatcggagttacacataaaacgatcaagaacataaaagctaatgactgtgaattcagactcatctttgaaatatgataaagaggggctgtcgaaataactaattgagcaatactagctgcaccaaaagtagaggctagcaatgtcacaatatttttcagtgagattcctaaagctaaagtttcaaaagcaaagaatacactagctagggggacttgataaactgctgacaaacctgcagctgcaccactaatgattaataaacgtttatccagcactttaagtgctaataaatccgatattttcccagcatttatggctccaaactctcgtggcgctccttcttttccaatagggccaccagttcctacataaatcaattgcaaaaatgcgtgacctatatgtagccagtaaggtgatttttttacagaaaaatccttaaaaacaacctgttgtttaatactagttatttgctttggtttgatttgtaagtaataccaactaagggatgctaaaaaggagactaaagtaagtgataacactcttttaattggtgtgacactatttaacaaagacagagtattttctctactatcaccaaatgctaaccactctgtaaacattaatacatagtgcattaagatagctccaactcctgccataactgtcataaatagaacggctatcataaacttgacagcatagtataatcgagaaaccattttaaagttcagcaactaatgatttaactaatcccttgaaatcttctttaatacgctgagtaacttcaacgacctcctcatgattgagctcagattggaagccagcggcaaagttagtaattgctgaaattcctaacactttaagccctgagtgagctgcaacgatcacctctggaaccgtggacatacctaccgcctgtgcgcccattgtttggaatgcacgaatttctgcaggtgtttcataagtgggtcctgatacacccaagtacacaccttcttcgagtttgatattctgtttttcagcaatttggtgagctttttgtcgatatgttgctgtataagcatccgacatgtctgggaaacgtggtccaaattcttcaaggttctcacctatgagagggttagtcccaatcatattgatgtggtctttgatcagcattaaagttcctggtccgtatccaatcccacccgctgcattagtcacaagcacactgtggcaagccaatgctctcatgatacgtactgggaaagtaacgacttccattgtatttccttcataaaagtgaaaacgaccttgaagtgctaataccttacggcctgataaatccccatacactaattttccagcatgaccaactactgttgactgtccccaatttgggatgtctgcataatccacaacaatgggattttcgatttcttcagctaattctcctaaaccagagcctaaaataaggccaaattctggtgctgtgacgccttttgcttgcaaaaagtctctagtctcattaattttttctaataatgtcatttacttacctcctaaaccattattcactatacaatatgctataaactttggataatctgtccatcttctttaacaaaatctttttccatctttacaggtaaaatggttaaaattgcttcacagggtcggcagagttttgcacctttactcgtaacaactatgggacgattgataagaataggatcttgtatcatcgcatcaatcatttcttcatctgtaacgctagaagattccaaattgaatttctcataagcaggaacatctgttcttagaagttccctcgcagaaagtttcatttctaacaacagttcaaccagttccatcctgctaggtggtgttttcagataataaataatttctggttcaataccacaatgacgaataatggcaagtacgttccttgatgtcccacaatttgggttatggtaaatcctaattttttccatcatcttcctctcaatttttaatgctacaagtgtcttaaggaaataaaaatttataccaagtcctgcaagaagctctctccaatcatcgcagtatcaacaccaaagttatccgcaactgttgctgaaatatctgcgaaatgccctactgggataaggccgtttcctgtgaaagatgggctataggctaagagaggaatgtattctcttgtatggtctgtacctgcataagttgggtcattaccatgatcggcagtgatcaaaagtaagtctttgtcacgcatcgctgaaatgatctctggaagacgctcatcaaactcatgaagacaatcacgataaccatgaggatcacgacggtgaccatagagagcatcaaagtcaaccaaattagtaaaggagaagcctttttcaaactctgataaccccattgtttttatcaaagtatcaataccatgactatttgatttgttatgtcccatatcatgattaatgcctgaaccattgaaaatatcattgattttaccaacagcataagtatcgatgccagcttgatctagtttatttaatacggtatcttcaaatggtgatactgcatagtcgtgacggttggctgtacgcgtaaagttgcctggttcacctacatatggacgagcgataatacgaccaaggagagctggacgctccattgtgatactacgagcatattcacaaatacggtagagttcttctagaggaatgatatcctcatgagctgcaatttgtaggactggatcagctgaggtatagatgatgagctcaccagtttccatttggcgtggtccgaagtcatcaataacagctgtccctgaataaggtttattcgcttcacgaataactttacgtcctgaaaaatcctcaatctttgtaataatatcttctggaaaaccattccagaaagtatcaaatggctctgtaatatttaagcccatgatctcccaatgccctgtcattgtatctttaccaagtgatacttcttgtaacttcgtcgcgtagccacttggattttcttctgcagggacggtcttaagcgcttggggacgaggaatattaccaagtccgattttagccatgtttggcaccgcaagtccaactgtttttgaaatgtggccaagcgtgtctgaagcaccatcaggaactcctgcattgacaaaatcattggcatctggtgccgctccaatccccactgaatctaagacaactaagtgaatgcgatcaaattgtgacattatatcttctttctaaggaggttacggttagctcctaaaaccgattatttaaataactatttttcaagtatgtcaagaccgtttttgcctgctactataactttattaaccataccattaaataaaccatgttcaacaacaccaactgtatggtcaagttcattcgctaactgctttggatcctctatttttttcaaatctaggtcgataatgtagttccccatatcagtgataaagcggtcaccttctgtttcacggaaagaaggacaataaccttttgatttaaaaacccgaaaaagacgctcagaaccatatctaacaacctcaacaggcaatttaaatgcacctaacgtttcaacaagtttgctctcatcgacaacccagatatattctttagttggagtagctactattttttccatgagcagcgcaccaccgccacccttgataccattaaaatcagggtctacttcatctgctccatccacagtgacatcaatgacatcaatatcatctgctgatttcaacggaatacctaatcctcttgcctgctcagtcgtacggtttgacgttgtaacgcctacgacttgcaatccctcttctttgacacggcgtccaatttcttcaacaaaaaaatatgctgtagaacctgtccctaaacctacaatcataccgtttttaacgtattttgcagcggtcactccagcaagtttttttagttcgtccatattttccccttttaagttaatgttgtctaatatttttgataagtctattcaaaacactatctcaagacacattataccattttttaagtgatttttgaaaacattttctttgttctttatgcattttagttagtagcgatagtcaaattctttatttttaataatctattgctaacgcacttatatcacctaaaataagtattcaaacaaaaaagatgagtttcttagctcatctttttatgcatataagttttttagcgtttgaatatcaacttcttgaatgccataatgcgaaccttttgactgcataacggaatgttgttgatcattatgtcctagacctaacgcatgtcctaattcatgttcggccgtattaacaatcctagtatggtcataaccaaactgtttattcttaaggtaaaatgtgtttaattcaactgttacctttgaaatacgattagttaaagcatttttctcggtttcagctacacccgcagcttgtgttttagcatctgagtaatccttagcaataatatcagcattaggattatctgttgtttgtaacacaaaagcacctgttgcattccaattggagattgcttgcttgtaagcagagaccaactcagaatctctagttgctatatagatagttgcctgatttttatcccatctggtattttctgaatgatgaacattatccgtagctagattagtaaaggaatttttgagctgattagtgtcagcaaaatttaaaaatgtttttcctgtctgaataatgtcactaagttgattagcaaattctgattgactgtgattcgcatagtaatacaagccaaataaaataatcgcaataacaagaactgtcttgaatattccccaaatgatattccaaatcaatctaaagataaactttggaatagcaaatatcattctaaatagtgttctcattttttatctcaccttctgtgtctaatttcccaaaacttaatgatttagtataacaagactttacttggatttcaacgatttagctaatactaagaaaggcgctcttctttgacataatcaacagggagccattctaagactttttctaattgttgattccagtaataccattcatgtttaccatgatcattgaaatagtcaatagttaaacctaattgacgaagttcatcaattgcgacttcattagcttcaaaaagaaaatcttcataaccacaccatgcataaaatttagtcttcatatcaaaagactcaacgtaacgccttagtgaatgacgctctatgttatcagtgttattcaaatcgccaaaaattcccgaccaatagttaatgttattgttgccattattgaataataaatcaaagtcaaaagaaagtgcacctgacaaagaggcagcatgagaaaaacgattagtcagtagagctattttatatgctccatatccccccatagataatccggcaatgaaatttttctctctcttatcagacatattaggaaagaaacgtttcaaaacttttggtaactcgatagctattgcatcaaaataatccaacccatactttgtgttggtataccatgctaagtctgttgatggcatcacgacgataagattagtatgacgtaaaagacgctctatatttgtgcgtttttgccaagaattctcatttccccccattccatggagaagatacaaaacaggaatgtcacaatcatcaattttatcatcagacatctcaaaagcatctgggtaaataacattgacttgacgttccgttcctagtaccttagagtgatattcaatattaaaaaatgccataaaaacctccattctagcaagaaaggctaccaaaatttggtaacctcttaacactatcaacgaacttccataaccacaggaaggattgctgggcgacgtttcgtttggtcaaataagaacttgctgacctcatcacgcactttccctttaagttcaccccagtcaaatgtatctttacttaagtaatcttctaccgttgtattaactaattctgcgctctcacgcaaaatatctctgctttttttcacatacacaaaaccacgcgtattaacacgagctttagaaataattttcttttcttttttgctgacagttataacaacaataaaaattccatcttcagataataccttgcggtcacgaagtacaatattaccaacgtcaccaatagcatttccatcaatcataacatctccagcaggaacagatccactatggaagaagccatctttttcaagaaccatgatgtcaccacgcttcacaatataaatatcatctgctgacattcctacctcttgagctaagcccgcatgtgctgacaaatccctatactctccttgaattgggaaaaggtatttaggtttcaatagattcattaataattgtaattcgcgaccatttgcatgacctgatacgcgcaaattctgtgttatcaatttaactgagccaccagctttataaatcagattttcaacacgcgctacaactgcctcttttgcaatacttggtgttgttacgataaatactaaatcaccatctttaatttgaacataacgatgacgtccgatcgccattttttggagaccatttatcggctctcccatacgtccagtttcaaggattaataattcgttatcttcgtaacgtgtcatatctttaggtttgataatcatattttcatcagcaatatgaatgcgtttcatacgaatggccgtacgaacaatattttcaatatcaaaacccgttaaaactactcgacgaccgttttctgccgctgcatcaaagacttgttgaatacgaatgagattacttgcaactgccgctacgatgactctaccttctgcgtcttcaataacgctcttaatttcatcaccgacctcatattcgctagcaacttgctcattgcttgtagcatttgcagaatctgataaaagtgctaaaacaccatcacgaccaatttcagctaaacgcgccagatctgtttggtaatatttccttgcagcttgatcaaatttaaagtcacctgtgtaaacgatatttccctcttttgtcccaataacaattcccattgactctggaattgaatgagtcgttttaaagaacgaaatcaccgcatcttgaaattcaatttccgtttcactatcaatcacatggaaattattgaatttcttgactgctgtactatttttaacgaataacttagctaattcaattgtgagaggtgagccaaacacaggtgctttgacttcggcgataatataaggcaatgcaccaatagcatccgcatgtccatgggttaagaaaatcccctgaacacgttttttattttcaattaagtaatcaagatttggaataacaacatcaacacccagttgttcattttcaggatatttgagtccagcatccaaaacaaagatagaatcattgacttctactacatataggttttttccgttttcacgaacacctccaagagccatgatttttatgtcgctcataatgagttttctccttaaattttgttaattctttttataaagcagacaagaaattgtccaattattatcattagtaattgatttatcggtaacttttcttgggtttgaagaaaaaccttattaatcaataataggaatatgaattaaagagtgtgtccttattttcatcccatttgtacttacggtccttgtctctacaagtcgatttacagcattattagtatatcatattttgaaaataatttcttgcaaagtgtatagaaaaagaagtgaaacacttccatttcacttctttttaatcaaataattgataatagtcagctatagccatcttgtttttttgtgcctgatttaaatctctgacaatcttgccatctttcattactaatacacgatttccatatttgagagcatcttccatatgatgtgtaatcattaaggcagtcaacgaatcttgtttgataaactcatcagtcaagcccataagcgaaacacttgttctaggatcaagcgctgctgtgtgttcgtccaataataacagatttggttttttcaaagttgccattaataaactaagcgcttgtctttgtccacctgataataaacctgtaggtgtctctaaatggcgatcaagtccattaccagttctagcaatcaatttttgaaattcttccgtatagttaataatctttctaggaactagcggtctcttttcacctcgaaatttagcaactaataaattttcagcaactgtcatcctaggtgctgttcccattttcggatcttgaaatacccgtgataaatatttagctcgtttttctgctgataaattagtaacatcttgtcccatgatgtaaatatttccactgcttaacatcaaggtacctgcaattacattaaaaagcgttgattttccagctccatttccacccaatattgtaatgaagtcatgttcataaatactcaaattaacatgatctaatatcgttttcatttctgctaaaccattactgacttgtacggttgcttcttttaactctatgattttcatcaccattataagcgtactcctttcaaaatcttcgtttttaggacaggaaccattaaacaaattccaagcactattgcactaaataattttaggtaattcgtattaaatcctaaggcgattactgccgttattaaaaattgataaagaatagaacccaccactatagcaattaaacgttcaaagagagttaaaccagtagagtaaagtacctctccaataataatactagctaacccaataacaataacacctataccttttgatacatcagcatatccatcttgttgacttactaaagctcctgataaagcaattaagccatttgatacaattaagccaagcatttccattttgtcggtatcaatgccgaagctctttgccatatcagggttatctcctgttgcaatataagcttgccccaagcgtgtatagagaaaataaattaaggcagaaatcaccaagagaatagctatcaagcctaatacgagaagatttaaatcatttgaaaacggaagaaaatctttcaatgtttgaatctcatttaaacctagatttgctcttttcataaccattagcataatagagtggcatgaggtcattactaaaatccctgctaaaatcgtcggtatctttcctttagtataaagtaaaccagtaacaaatcccgctaacatccctgatagcatgcctagaatcgtcgccaaaataggattaaccccttgattcattaaggtaacacaaaccgctccccctagagggaaggagccctctgttgtcatgtctggaaattttaagattctaaaggttaagtatatccctaatcctaatatcccccataataaaccttgtgaaactgatgaaataatcataaaaccctctttctaatcgtcaaccttaacggtaatttctgcctgtttcataatcttcttaggaattttaattcctaagtgtttggctgctttcaaattgaggcttggcttccctgtatcaataactttgactggtacatctttaaccggcttccctcttaggactttaatggcctgttttgcagtttctaaccctaagccatattgactctgcgctactgatgctatacttccttgttcaaccatggtatcaacactggaatacacaggtatattagcttggtttgctgctacgataactgttctaaaagcactcgcaatagtattatcttgtggaacaaagacagcgtctacttttttggtcatgactgacatacttgtcttaatttcatttgtagatggtacagaatatttaagaacttctagccctgctttttgagcatattttgtaaactcagttacttgtgatacagaattatcttcgctactagcataaagaattcctatacgtttaatattgggagttatatccttgattaattgcacagtttgcttggtcggaacaacgtttgataatcctgtaacattagttgttggtttcttcatattcgttactaacttggcccctaaaggatcagaaacagctcccatgattataggagtgtccttagtcgaagctgctaaaccttgtgctgatggtgtcgcaattccaatcaaaatatcattgtgatgattaactaattgtttactcatcgcttgaattttactttgatcagcttcggcgtttaaaacggttaatttaacttttttccctttatatccttcttgagctagaccatcttcaactcccttttcaatagcatccaaagcatcatgggttacatactgtaaaataccaattttaacaacttgcttttctgataaattaagacgtttttctgatttgttataaaataattctccaaccactaatatagtcaatagaattagcgtagctatcagccctttatttttcatattttctcctcactttaataataccttgactttctggagtttagcgcaaaagaaaaagcgcctgataaataacttaccttgcgctctctattgttagactagaccagcgcatagatacttttttgaagtactccaaaaagtcgtatctatgcacccataaacacaactttatctacgccagttttgccaattggtaaataatgttttagtcatttactagtcatcttttctcatgaatttttctataattatatactatattctgaaaattgcaagccttttgcattataaaaaaatatttttagctcagcctatggtataataaataagctataatttttagaataagggggacgccatgtcttttgatggattttttttacatcacctcacaaatgaattacaagaacagattgaaaaaggacgtatccaaaaagttaaccaaccttttgaccatgaattggtattaacaatacgcaacaatcgtcgcaactataaactactcctatctgctcatcctgtatttggacgtatccaaactaccgaagcaaatttccaaaatcctcaaaatccaaatacttttacaatgatcatgagaaagtatttgcaaggtgcagtgattgaaaccattcaacaaattgaaaatgaccgtatattagaaatcgtcgtgtctaataaaaacgaaatcggtgatcacattaaagcaacacttgttgttgaaatcatgggaaaacacagtaacattatcttgattgataaaaatgaacataaaattattgaatcaattaagcatgttggtttctcacaaaactcctatcgtactatccttcctggttcgacttacattgccccacccaaaacaaaagcaatcaatccttttgatatttctgatcaaaccctatttgagctgcttcaaaccaatgatctaagccctaaaaacctccaacagctcctccaaggtttaggacgcgatactgcgctagaattatctcactgtttgaaagacaataaacttaacgattttcgtcaattcttttcgagagaatattatcccagcctaacagaaaaatccttttccgctgtccaattctcaagcagtcacgaaacatttcagtctcttggacaattgttagattattactaccaagagaaggctgaaaaagatcgcatagcacagcaagctagtgacctcatccaccgtgttcaaagtgagttagagaaaaatatcaaaaaactagctaagcaacaagacgaacttctagctactgaaaatgcagaggagtttcgccaaaaaggagagcttctaactacctatctctctatggtaccaaataatcaagatgtcgttgtgcttgataattattacaccaaccaaaccattgagatttcacttgatcgagctttaacacccaaccaaaatgcccaacgctactttaaaaaatatcaaaaattaaaagaagctgtaaaacatttaaaaggaattatttcagatacggaaaatacaatcacctaccttgaatctgttgaaacatcgctaaatcatgcttctatggaagatatcaatgatattcgtgaagaacttgttgaaactggatttattaagcgacgcgcacatgataaacaacataagcgtaaaaaacctgaacaatatttagcatccgatggcaagactattattatggtgggacgtaataatctccaaaatgacgagttaacatttaaaatggctcgtaaaggggagttgtggtttcatgccaaggatatccccggaagccatgtgttaattcgggataacctcaatccaagtgacgaggttaagacagatgccgccgagttagctgcttattactctaaagctcgtctctccaatcttgttcaagtagacatgattgaagcaaaaaaactcaataaaccaagtggtactaagccaggttttgtaacttacactggtcaaaaaaccttacgagtcactcccacacaagaaaaaatagatagccttaaactaaaaaaatagactgggacatatccctgtctatttttagtgttattaattatttataggtattcttattcacttaaatcaatatcttctctaagcttttgtaggtcaaagttagctttcaaaaattcttgatcttgagttgggaaacattggtcaagttggtcaacctttccaatttcaacttttccttgtgtgagcgagtaatccataacatgcccaccgaaagttaaatcgtctgaaataaagtggacatggaacccttttacccccacaccatgaaataattccggcgtccaaatcccaaccaacgtaccagatacattctctctggtaaattctggctgattagatgcaatatctgcaaaacgtttatgttgtggagattttggaatcatacgaacgtgcattcttgaaaacgttcctttgatttttaaagacttaaagagattttgaccttcaaagttttttagaatcatctcttccaaatccttattatctatctcagcattgatatcaaattgtttttggatatggtgtggtaaaaccgctgcatagggtactgtcacatcatctgataattggataatctctgctttaccatctgtaccaatagcttgataagctttcccatccaatacaatcaattcaccatcaatcatatgaacagtaccgattcctaagtcaccgtgagttaataattctccgatagttagactgcctttgtacaatcctgccatcagtgaactcaaggtactgtattgaaataatttaactgtttctgacatattagacctcgtcttagtagaactcgtcaggtaagattgtttcacctagtgtcacgttatctttatagtcaataggcacatcaatcaacactggtccattttcagcatcgattagagcttgtttgagtgtttcttcaaaactgtctttgctgtctacacggtaacctttagcaccgaaactttcagcgtattttacaaaatcaactggtccaaagtcaacacctgaagaacgcccatacttcatttcttcttggaattcaaccatgttatattttccatcgttccaaataatgtgaacaattggtagatgaagacgaactgcagtttctaactcttgagctgagaataagaagccaccatcaccagaaactgaaataacttttgtgttgggacgcaaaagagccgcagaaattgcccaaggtagagcaactcctaatgtttgcattccgtttgagaaaagcaagtgacgcgcttcatatgatttaaagtagcgagccatccaaatataatggcttcccacatcaactgtaacagtcatgtcatcggtggtattttcttggagtacatcaatgagatcaagaggatgaacaagtccatgagctgagtcacgatcaaatttaacatcgctaacgttttcaatattattacgaagacctttcaaatactcttttgaaccttctggcaattcatatcctttaatagctggtaaaagtaaatcaagtgtatgtgccatgtctccaatcagttctcgctcgggttggaaatacgtatcaatttctgcttgttcaacgtcaataacaataatacgagcagaaatttcagcattccagttacgcgcctcatattcaatagggtcatacccgatagcaataactaggtctgcacgcttcaaaagcatatctccaggttgattacggaagaggcctacacgaccaaagaatgtttcatcctcgagctcacgtgacacaatacccgcaccttggaaagtttctactactggtagtttaacagcatcaagaagtcgacgtacggcagcagttactccctctgaagatgcgccatttcctaataacagtaccggtaaaacagcattgttaatagcttgcgctaaataattaatatctaaaacagatgccgaacccaatttaggtgcactaagaggtttgattgcttttactgagactggactgtctgtaacgtcttgaggaatagagataaaacttgctcctggtttaccagatttagcaagacgataggcgtttgcaacagtttctgacaaagtattagggtcatgaacctcagcagaatattttgtaataggttccagcatagcaacgttattcattgattgatgagcacgtttcaataaatctcctcgcttaacctgtccaccaattgctagaacagcatcaccttcatctgtcgcagtaactaaccctgttgccaagttcgagatcccaggtccactagttgcaataacaactcctggttctcccgtaatacgcccgacagcctgagccataaaagtcgcgttctgctcatgacgagcaacaattaactctggacctttatcttctagagtgtcaaatacgcggtcaatcttagctcctgggataccaaaaacatatttgacatcatgattaatgaggctatcgacaattaagtcagccccatattgattatgtgattctgtcattttatctccctcttttcacaagaatggttcaattatatcacagtttttacatcagattgtgaaaatttacttgtgaattatttatttttttctgtaagtgttttcctatttaaatgttattcacccattctgacatctctatatcatctggaactaattttaaataagcctttcctacttcttgtgccttatcaaggtaaccaaattctctcaaaatgtaagcataatcttgtaaaaattctggattatcttttaaatcattatacaaagattgataatagtctacactatcatccatttctaaagccttgtgtgctttagcgatattccattttgcaaggatattttctaaattatcattgtctaattccaagacttcctcaaaccgctcttcttcaagatacaaatttgacaatctcataacaatttcatcttgattttcagaaactttttcagcttgtttcaaataagactccgacgaatgaacatcatgtaattcatacgataattgtgaggctagtaagagaagttgaccatcaaaactatttttacgaataccttgctgaactagacgtaaagcttcttcagatttatgctcctcacgaagagataaaccatagatatattcatagccagcaaagtctggattaatagtatccaactgtttaaaataaaggttagctttttgatattcttcttgatcataaaggattgttgctaactcaaaaactgttaaatcatcatactcaatgtcaacggctttttctaaaaattcgatagctgcatcaaatttccccataatagcgtaggatttaccaatacgctgataagttgaaactccagtcgtttctaagatttctcgattgtcaagtgaggcatatccttctatcgcttcttgataatgttccaaactaaggttcatttcagctaaaccaaatgtaaccaatgggtcatcgctaagtttgctggctagcaaaagcttttcacgcgcaacatcagtcaagccttccatatcatataagtcagccataacaaggagggctgaaacatactcttgactatcttctgagatataatctaagtataagaatgcttgttcaatatctccatcttcggcaacaatttgagctaaattgatagcaacttctggataatttggtcggatttgatcatagagacgttttgcttggggtaaaaaaccaatactctccaaataagctcctagttccaacaagacttcctcaggatcatttttcaacgctttttcgaaatacttgttagcatgttctaaatcctgattttggatagaaacaatcattttttcactattcaacatttttaacttcttcacttctttcttcagtaacaacatctactgtatatagcccactgacagctttgtaccaatcaaacaattctttaacaacaactttgatagatgcataaatcggaatactgaggaatactccccaaacaccaaacatcgctccagaggttaataaaataaacataattgtaattggatgaatgctaagtttattacctaaaaccaagggtgagacaaagcgtccttctagagtttgctcaataacaaaaacaatcgcaactttaacaaccataacaggtcctgcgacaagcgctaagataaacactggaatttgggcgacaaaacttcccaaatagggaaccatatttaacacaccggcaataatccctaatgtcacgccatatctaaggcctataatactatacattattgaaaaaataacaccaacagtaatagcaacaatgatttgtccttgcacataccctgacatttgactattcatttctcgcaaaatacgatcagttggttggcgtagtttggttggtaaaaccattaagaaaccattcttcatgttgcgactatctcttaaaagataaaacaaaataaagggagccatgattgttgctactgtcacacgtgcaactgtactagctaaatttcctgcccaatctaaaatattctttgaaaatttttcagcataagagaccgcttggctactgatattagataacatgctcgatatttcccctttataagattttaaccaagggttgtgatctataaacgaacttgtttccatttgcactttattcacatatgaagggagatcttccataaaatggcgtaattgattactcatcatgggaataaaactagacattgcccaaattaacagaaggattataatagtaaaaactgataatatcgctgttacacgcttaattccccgcttctctaaaaatgtaaccataggttttaataggtaataaagcaagccagaaattacaagcggcaatatcagcacagcaagaaaatcaaacacaggtttaaacataaaagagattttggtaaaaataaaaatcgttaaaaataccaaaaaggtaatcatgagagcaataactgcttgattatttaagatccatttaaaaaacaaactatttttaaattctttttctgatggtcgattcattcacatatcctttcaagatgaattctaattttaattctcatttattataacacgttaaattaaattaaactcaaaacaagagagtaaaaagttaattttgaacaattttatgcacaacatgacctggccattctatcaaatcctgtgctaaaaaattaggattacaatcaatttttgttaattcttttattggaagccatacaaaatgtcgcttatgcgttccttctttgatagattctggcgcctgacccaagagattaacaaaatataaaaattcaactgagtgataatgatgtctcttaatattaaactgattctcaataatataggctaaatcaccaacttggctgtgaagacctatttcctcaagtacttctctcgcaacagccttattgctatcttctccaacttgaagcgccccacctggcaaatagtatttatcgagatgaggagcatatattaatagcagtttttgattttctatgattaaagcagaaactctgactccgaatgtttcgagctgttctctaaccctaaaatctctatttttcataaaaattaaccgtcttttcaattaaattttggtgttcatcataaacaaacttagcagaaaagaaaggaacatcttctaaaatccatttaaaaatttcgtaatctccttgccacgttggcttagaaagaacttgatcatatggtacccattctaaagttccttctcgtgattcatcatctgaaattaactctccttcataatctgttactttaaagacataggtataccaatcatgacctggcgtaaattcaggaaaagtgatgactcctttaaaatccattttttttaccgttaaatgggtttcttctagaatttcacgcttagcacattcatcaggagtttcacctgcctccagtttaccacctaccgagatccactttccctcatgaacatcattctcttttttgttgcggtgcaatagaagtaattccttgccattgtcaatgtaacaaattgttgctaatttagtcatttcaaactcctctcattctcatattataacaaaaaatagcctttatttaggcaatttactatcaaagtagcacacaaatgattaaacaaattattttgtttaccagttatttacttttcactttgatgacattttaaaggttctttatcataaacctttaaagcatgctataattaggaaaaaccggtttacaattttaaaacctaaggagtaaaaaatggaaatcaaaaagaaacatcgtattatgctttattcagcccttattttaggaacaatattggttaacaatagttaccaagctaaagctgaagagcttaccaaaactacctcaacgtcacaaataagagatactcaaactaataatgttgaagctccccagactgaaagtaccactgtcaaagagactagcaccacaaccacacaacaagatttgtctaactccacagcttcaaccgcaactgcaacagccactcctagcacaatgaaacaagtagtagataatcaaactcaaaataaggagctggtgaaaaacggagattttaatcaaactaaccctgtatctggaagctggtcacatacaggcgctagggaatggtctgcttggattgataaagaaaatactgctgataaatcacctattatccaacgtaccgaacaaggccaagtaagtctatccagcgacaaaggctttagaggtgctgtaacacaaaaagtgaacattgatcccactaaaaaatatgaggtcaagtttgatattgaaacaagtaacaaggctggacaagctttccttcgtattatggagaaaaaagataacaatacgcgactttggctttctgagatgaccagcggtactactaacaaacataccttaacaaagatatataacccaaagttagatgtctccgaggtgacacttgaactttattatgaaaaaggaacaggttctgttacttttgataatatatcaatgaaagcaaaaggccctaaagactcagagcatccacaacccgtcacaacacaaattgaaaaaagcgttaatacggctttaaacaaaaattacgtttttaataaagctgactaccaatacactctaaccaatccgtctcttgggaaaattgttggtggaatattgtatccaaacgctactggttcaacaactgttaaaatatctgataaatctggcaaaataattaaagaagtaccgttatcagttacagcttcaacagaagataactttacaaaactcctcgacaaatggaacgacgtgactattggtaatcatgtttacgatactaatgattcgaacatgcaaaagcttaatcagaaattagatgaaactaacgccaaaaacatcgaagctatcaaactggattctaatcgcactttcctttggaaagatttagataatctcaataattcagcacagttaaccgctacttatcgtcgtttggaagatttagctaaacaaatcaccaatccacactctactatttacaaaaatgaaaaagctattcgtactgtaaaagagagtctggcttggcttcatcaaaacttctacaatgttaataaagatatagaaggctctgccaattggtgggattttgaaatcggtgttcctcgctcaattacaggtaccctagctctcatgtataactacttcactgacgctgaaataaaaacttataccgacccaattgaacattttgttcctgatgcaggatttttccgtaaaacgcttgtcaatccatttaaagcccttggtggtaatctagtcgatatggggcgcgttaaaatcattgaaggtttacttcgtaaagacaatactattatcgaaaaaacttctcattctctaaaaaatctttttactactgctactaaagctgaaggcttctatgctgacggttcttacatcgaccatacgaatgttgcttatactggcgcctatggtaatgttctgatagatggtttgacacaattgctgcctatcattcaagaaactgactataaaatctctaatcaagaacttgatatggtttataaatggattaatcaatcatttttacctttaattgtaaaaggtgagttaatggatatgagtcgtggacgctcaattagtagagaggctgcttcttctcatgcggctgcagttgaagttctcagaggtttcctcagattggctaacatgtctaatgaagagcgaaacttagacctcaaatcaactattaaaacgattatcacttcaaataaattctacaacgtcttcaataacctcaaatcgtattccgatattgccaacatgaataagctgcttaatgacagtacagtcgctactaaacctttaaaaagtaatttatcaacctttaatagcatggaccgcttagcttattataatgccgagaaagactttggtttcgcactttcattacattctaaacgtaccctcaactatgaaggaatgaatgatgaaaatacacgtggttggtataccggagatggtatgttctatctttataatagtgatcaatctcattatagtaatcatttttggccaaccgtcaatccttataaaatggctggaacaactgaaaaagatgctaagcgtgaagatacgactaaggatttcatgagcaaacatagcaaagacgctaaagaaaaaaccggtcaagttacaggagcatctgactttgttggttccgtcaaacttaatgatcactttgctcttgccgctatggactttactaactgggatcgcaccttaacagcacaaaaaggttgggttatcttaaatgataagattgtctttttaggtagcaacatcaagaatactaacggcattggaaatgtttctacaacaattgatcaacgaaaagacgattctaaaacaccttatactacatacgtcaatggaaaaactgttgatttaaagcaagcaagttctcaacaatttacagatacaaagagtgtctttttagaatcaaaagaacctggtcgcaatattggttatatcttctttaaaaatagcactattgatattgaacgcaaagagcaaacaggtacttggaacagcattaatcgtacttctaaaaatacctcaatcgttagcaatccttttatcactataagccaaaagcatgacaacaaaggtgatagctatgattacatgatggttccaaacattgatcgcacaagttttgataaattagccaatagcaaagaagtagaattactagaaaacagttcaaaacaacaagttatctatgataaaaacagtcaaacttgggctgttatcaaacacgataatcaagagagtctcattaacaatcaattcaaaatgaataaagcgggactttacctagtacaaaaagttggtaatgactatcaaaatgtctattaccaacctcaaagcatgacaaaaacagaccaattagctatctaactagccgtacataaaaaacctatcatcaaaatgataggttttttggttcaattagttaatgacttcttgcgttttagcgtagttagcttcaactgcttctttctctgctttccaccaatcttggttttcagtgtaccagttgattgtttcttccaaaccttctgagaagtttgtgaattgtggttcccaaccaagttcttcacgcaattttgtagaatcgatagcgtaacgaaggtcgtgtccagcacggtcagttacgtgatcgtaagcgtcttttggttgacccattttctcaaggataagttcaagaacttccttgttgtttttctcaccgtcggcaccaataaggtatgtttcaccaatacgacccttagtcaaaatagcccagacacctgttgaatgatcatttgtgtggatccagtcacggacgtttttaccttcaccataaagtttcggtttgattcctgccaagatatttgtaatttgacgtggaatgaatttttcgatgtgttggtatggtccatagttatttgaacagttcgaaatggtcgcttttacgccgaaggaacgtacccatgccttaacgataaggtcagaagctgccttagttgatgagtaaggtgatgatggattgtattttgtttcagcagtgaatttttcacctggtccttcaccatttcctggaaggtcttcacgaagtggcagatctccataaacttcatcagttgacacgtggtggaaacggatatcgtatttacgagctgcttcaagcaaagtgtaagttccgataaagtttgtatggataaatggacttggatcgttaagtgagttgtcattgtggctctcagccgcatagtgaacaatagcatctgctttggcagccaacttgtctaccaattcagcgtcagcgatgtcaccaacaactaactcaacacgatcaccaagaatggcttcaatgttagcacggttacctgcatatgtcaatttatcaaggacagttacatgaacatctgggtggttattgtaaacatagtgtacaaagtttgatccgatgaaaccagctccaccagttacgataatgtttttaaattcagtcattttttctccgaaaaattttttctttttgctatttgaaggatactgttctgttagaagtagttctatggaatgtcatgcctaagaaatcaatatttcaaatccctgagggaacaggccttttgcatgtttcctttcacccttgcgtcaaacaacattgctaattcgtttttacttgctaaggttaatgccttttaagaagttgaaaattacaaatcttccttcttcaaaggttttacatctttgagaagtgggtgattcttatctgcttctgagacttctgcttcttcaaggttttcccactgaatgcctagatttggatctgcataattaacgaaagcatattttggtttgagttcaagtgcccaataatcgttaacgagataagtataagctgctttatctgaaagaacttggaaaccattagcaacaccgcgtggaacaaagataccttttgaggcatcgataatcgtttggtaaacgttaccaaaactgtcaccttcacggaggtcaacccaagtaccgatcacacgtccttcatcagcgatcgaaacatatttatcccaaggctctgcatggagacctcgcaaagtatttttcttgttaaacgaaatattattttgtagtttgtctgcctcaaagaagctttctgggaaaccaagcggtatcattttttctttttgaaagttctctttgaaccatcctcggttgtctccacgaacgggaatatcgaattccaacaatccaggaatagcttcaattgggcgacaagttaattctttatcaaaaaattgttcagtcattaggcttctccaatcaaacgaagtaggtattgaccatactcatttttcttaagtggttgtgccaactcaaggacttgttcacgagtgatgtagcccatgcggtaagcaatttcctcaaggttagcaacttgaacgttttgcatgcgttgtactgtttcaatatattgtgctgcttcaagaagactttcgtgagttccagtgtctaaccacgcaaatccacgtcccattaactcaactgataagtcacctctatcaaggtaggctttgttaacatcagtaatttcaagttctccacgagggcttggcttaatatttttagcgatttcaaccacatcgttatcatagaaataaagacctgtgacagcataattagacttaggttgcgctggtttttcttcaatagaaatggcattcatatcagtatcaaactcgacaacaccaaaacgttctggatcttttacttgatagccaaagacggttgctccactttctttactagctgcacgttgtagcattgcagataaacctggtccatggtaaatattatcacctaatactaaagcaacgtgatcatcaccaataaaatcttcaccgataatgaaggcctgtgctaacccatctgggcttggttgttcagcataagaaagagagattcctagttctgaaccatctccaagcatatcttcaaagcgaggcaaatcttgtggagtagaaataatcagtatttcttttattcctgctaacatcaaaactgacaatggataataaatcattggtttatcataaattggcatcaattgttttgatgcagcacgagttaatgggtacaagcgagtacctgaacctcccgctaaaataatacctttcatagtaaggtctccttatttatattaatcctacatattataacactttttttaaacgctatcatctactaatctttttcacgtattttgtaatatcgtaatcctctaaatttagctgattttctttatttaagattaattgacataattcataaccaattaatgggcccactgttaagccagttgatcctaatccacttgcagcatatgcaccctccatacaagggacagggccaaaaaatggagaaaaatcacttgtataggcacgaattccaacacgttcagaagtcgtatctgctttttttaattgcggaaaatagccaatagcttgctcttcaaacttgtctaagactttaaaatcaatgtttaaatcaaaagccatatcattttcgtgacttgcacctacagagactttaccattatcaaatgggataatatctagctcaccttctggcattacaacaggatattttcctgtattaatattgctaaaataatagtctcgcaattgccctttttgagggcgaacatctacctgatagttgtgctcatctaatatcttagctagccaggctccactcgctaaaacaagtttatcaaaatcaattccttgaacacgaaagccattatcagttatcgtaaagtgaacttcatccttgatgacattaacaccacttgcttctaacaatattcgtgttaagtccgccccttctactcgtgctcctccgctcgcataaagtaactgttcatagccatctaactcaggaaagtgagtatttgcttcacttttatttagtatttgtaaatcacctattagaggagattctagtcgacgtttatctgctagtgcaaacaatgactctaactgactctcgtccttttttaataagaaaacaccagtttgctgataaaattttgtttcaaaaccatctttttgtaaatccgtgactagctttgaataaaaatcagcccccaacctcgccatacgataccaggctttattacgacgttttgaaaaccatgggctaataatccccgcagcagccttagttgcttgtccaactccataatcaaaaacagtaacctgaatatccttttcttttgataagtaataggctagtgtcgctccgactgctcctgcaccaataattgctatctttttcataatagctcctacatatggtaaaagggatttgttggagctttactctctaaaactgaaatatcccagcctttttcaagtttccactgctcaatcatagtagctattttagaaacaaataaaacctcaatatgatgacctgggtcaatcgcaagcaaaccatttgtgatcatttcttgtgcagtatgataataaatatctcccgttacaaaaacatctgctccttttgcaatagcttctttgtagaaactttgcccactacccccacaaatagcaactcgttgaatttcaggattagatttatcatatgaaactaaacgaacgctatctaaaccaaacacatctttaattttccatgcaaaaaattcaaaactctggggtctaatatcaccaatgcgaccaataccataaccattacttgtctcagataatatatcgggatattgaatatctaataattcacaaaaccagtcgttaagtccattaggaacgatatctatattagtatggctcacataaacagcaatgtctgatttaagaaggtctatataaatcttattttgcggcgttgctaccaaatcctttaatggacgaaaaataggagcatgctttacaataagaagatctacttgacgttcaattgcttcagctactgtagtctctcgaacatctaaagctaccatgactgtctttatttctttatctaaagatccaatttgaagacctgaaatatctccttccatagataattcctgtggacaataagtttcatatacatcaataagttctctagctttcatcaagaacctcctttatatcctgtattttatcttccaaaatagcgcgttcttccattttactattgggaatagagtttaaagcaaaagttaatttattaagctcattttgccatttttctttaaaaaccgttgtgttattggataataaaaatggaccaaatcgcaattctttagcagttaaattcatatgaccatgcttaacaactaaaatttcatagcgtttgtcattttcagtcaagatatcttctgctactatttcaaaatcatttgcagctaaccattttcttaaatcatcttcccgattattaggttgtaagactagtgttttaacgtgctgaagtttgtctatatcgttattcaaaatatcagcaatcaaacgaccacccattccacagatagttatcgtatcaatattatctgcttcttcaaaagctgacaaaccatttgctaagcgaacatctatctttgaagtgagaccatgttctgaaacgtttttcaacgcagactgatacggtccattcaccacttcaccagcaatggcaaaatcacagtatcccatctgcaacaaaaaaataggtaagtaagcatgatcacttcctacatctaataaccgagctccttttggaacgtagtttgcaactttttgtaatcgttttgataattgtaaatccattgtatttccttcagtttttctctgttaaaagtataacatcattaacatcaaaagaaaaggagcagacctaatgtatcaaccattctgtctcctcctagtaaacttattcccataaattcattgcatttttaaaatcatccgaaatcgctaaatctttcatttggttatcttcacgtgcttgttttctctcttcaatttgtcgaagtgtcgtcaatccttcacgccgccagttgcgaaggatagcattgatataattccaacttgttttcccattgaaaaccgcttctctaagagctgccctaacaatatcaggatctgtctgatcttcttgcagtgtcttttgtaaatcttctaattcaaaaggacttaataagcgacctaattcacgttcgaagtctcctactaaatctttcagacgattcgaatcagaggttttattgtctattattacttgattatcctcttcgaaaagtttatctaatttagcaaacacagggcttgtatcaaagataatctcgatttcatgattcaactcaattgttttgacatctagtaaaccttgacttgttaaattcgatatagaacgattgatatctgccactgttttatcaagtgatgtcgcaatacggctcggtgttagatcggataaattagttgtattttgtaaatagaaaaattgccaaactaaaaaatcgtctgctgtcttaaaaatagatttaaagtgaaaaaataaagcacttggtagagtcaattgccctgactgatattgttccaaataagtcataacctttcaaatcctctctatcgtcctaaaattatgaaatgtgtaacaaaaagcacctctcaactattatcatagcacttagaggcgcccttatcattcatctatcttgaataggccttatcctggaaagttcatcaataccttagtatcataaccttcaatagctttacgaccatttaatccatcaagttcaactaggaaagcacagcctgcgacaacgccaccaagtttttcaatcatttcaattgtcgcttttactgttccaccagtagctaaaaggtcatcaacaattaaaacacgttggcctggtttaatagcatctgcgtgcattgtcaatgtatcaagaccatattctttttcatagtcagctgaaataacttcgcgtggtaatttacctggtttacggactggagcaaaaccaataccaagagcataagcaactgggcaaccaacaataaagccacgagcttctggtccaacaatcatatcaatatctttatcagcagcatattgtacaatttcacgaacagcatagctgtatgctttaccatcagccattaatggggagatatcacggaaagtaattccttcttgaggatagttttcaattgaagcgatgtaattatttaaatccatttcacttgtctttctaaggggaaacccctaaaatgttttactcttcattatatcataaaattaaataaaatagtactggaaactttaaaaccatatgctagttttgcatatggttttaaaaattaggcatctgttaccttgacaaaaggtgctccaatatcaattctatcctcactataatagctctgttctttccaaagttgtgaaattggataccaaccagacaaggacggtgtgtaagggtcagagacatgtgtcagtccgttattatatcctttgagaacgatttcatgacttccatgaagaacaaaaacattattttgtactgccgctaggacatgataaccatccttcaacgcttgtacaaggttagcttgagttcctaatgcagttgcagttacaccccattctttggctgcttttaaaattcctctagaagttgttccttgaacaccacgattaaattcaactgtcttatggtaaaggtaatctgcaatttgcgttggtaaaacagtttctcctttcaaagaagacaaaatcatagctagagaagttggtacacaaccagtttctcctaaagttgccataccatatcttcgacttgcccaccttccatcacgttggctaaagtaaggagtattataatttgaatgtgcgacttgtagagaagtttttaccaataattgtttttgattagaagcattttcctgataaacatggataaagtatttaccattgtctctatgatttgtaacattaaatgtcaatgtagcttcatgatttttgggtgcgacggtataccacttaaggtcatcctgattgtttttatctgaccaaatagcaatttttaaatccccaggactaataacatttgtcactcgtacattatagtttccagttcccttataagtcgtttggacagttaccggtattttagcagtctcaactaatttaatttcgattgcttcaattcgttttccttggttagtactaccagcgatgtcattgttataagtccaatcctgccaaccataatcttgcatgtgaactcgatacatcacactataggttttcgatagcagacctgtcaatcgcatctgaatagcttctacttgttgagattcatttggtacattactttctctccctgaattaacaacagtttgccaacctgaaccattaagaaaagttctatattctatatttcctagagctgtactacctaagttaagtttgatggcttttatagattttgaaagtccaatactacctcctaattggccttccaaaaccgttggtttccaaccatctttttgaagataagtttgataacttaatccaggatgcttcatttctaagaatgaatgatttgtttgggaactaaaatctgaagctttagctactagttttacctccaaagcctctaaacgtttcgattctccgactgtacctgctacactattatttttttgccaagccatccaacctttatcttggacgtgagcgcgataataaatatcataattttgttttaaattcccacttaagtccaattgaatagcttctagtctttttccttgataatccttacttgtttgactacctaaaatttctccccaacctttatcttgtacatgagtacgatagagaatgtccccatacttcaaggtgctaagagtgaattttactccatctagggctttggattctcctaaagttcccgccatttgtccttcaagtttattagattgccaaccattttggcctaccttaacctgataatttaagacaggtctctcttccttaggtatagttggtgttaaaacagattgtcctttaagggtaaattttacttcgtaagcttcaaggcgctttgacattcccaaagtcccagcgtaagctccatttttagcccaagccatccacccgatatcttgaacatgaacacgataatagacatcatataatttttgtaaattatcagtaaggttaatgcttagtgcttcaataggtctactctgaccaacagtaccactaacttgaccactctctactgaaggttgccaaccttgtcctttaacataagttttatagctaagttttcctgttattccttcaggtgctttaatagacaattttattgcctcaacctgcttttcttgtcctactgttcctgaaactgttgcattatcaaccgacttttgccatccaatatcttgaacatgagcagagtaagtcactgttggtaattgctttgttgaattttgttgagtaataacttcactatcattagctacttgattaacattagaatttgtttgatttgctgagtgctcagcagtactagcttttacaacaacttttgagctagcatcaaaggttttgactggggtagctgctatctctctaggattagatgaaacagatgtagcaaaggctgtttttattaaaggctctgcactatttttcatagcctccgaggaattaacaggtaacgttaacttggaagtatccgaaatagtctgactgctatcagttttctctgagatcgttgaagttactgcttctgcctgttctgccttgacatcttgaccaagaattgcactaccacctaaaatggtaacgatacctgcaacgacccaaaatttgccttttttgtacatcttttttctaacgataggtctcatagattttatcctcgcctttaatattctttatcaaaaattccattattttcttaattttattatattttaataatatttgcaatattattattgaaataacttatttatataccaaaaaaaccacttaaaaagtggtttctttagtatattatcaactcatcataaaatcatatatttctttaggtgtccctaaagccattaattcttgaaacttaactgtctcttttaattcttgataaatttgactctcagagatatctcgcttttctgcttctttattgactgtcataatcccttctgtaatcgtaacaaaatgtagttcttcaaaaatttgaatcattttaattaataaaatatcagggatatgaaggtaggaactgagctcttttaacttataacgaacgtcaaattctgggaattgatatattgttttatataaactagcaaactgatcacgtgtaccataaccagatataaaataattttttggtatctcatttttaaaatagatggcatcaaactgtttaccttgagtcatttgttttaattcttgtggatgatcgggaacagtcaaaagaataacttctttgctctgctcttcttgagacaggattggcactccatgaggtaaactacttgctttgcttctaatatcaaataattgaataccgtctacacgcgcatcctccaacattaattgtagggttgtggcaccattccattgattaacagataaagtgacagctaactccaaatgttgtgcttgttggaactcttgtagttgactccccatattaaatgctaccaaatcaagtgcttgtccatcttgttctagttttaatttcagatgagcaccgttttgccccatgactctggcttgactcactttaaaatcttttaacaaaaagactggttttttattatccattccaaatggcgctaacttttcaaaatctctaacagtgtctaaactaagttcgtcaaaacgtagctcactatcaattgtcagagtttttttctgactcatgtccaattgttttttagagatatagtcacataaaacttgagaaagatcacctactttactttcctctaaagtcatgcctgctgctccgctgtgacctccaaaagcaatgaataattctcgatgctggtcaaaagcttgaaaaatatcaagtgcttctacacttctggcacttcctttagcaataccatcttcaatattcaaaacaataacaggttgtccagttctctctaaaatacgacccgccacaatacctaaaacccctggatgccaattttcttttgctaaaacttgtacaggctttgtttgatcaagcatttgcatagcttggtcaaagatagtttgaacgatttctttgcgctcttcatttttttgatcaatcatttgggctattgcttgagattcttcatcatcaaaccctgttagtaattcaatagctggattagggtcatcaagtcttcctaaagcgtttaattgtggagcaattttaaatccaatagtttcttcatttagtgtttttaaatcaatatttgataaagatattagctcctgtaagcctattctttcactatctttcataacttcaagtccagcttttaccatgatacgattttcatcagttaggctaaccatatctgcaatcgtcccaatagcaaccaaatccaacatttctgtcgggattgtttctaagagagcacaagctactttgaaagcaacaccacaccctgctaaataaggaaatggataattagcatcaggatgttctgggtgaataatagcataagcacaaggtaaatctgctggcatactgtgatgatcagtaactaccacgtccacaccttgattttgagcatatgtaattgcttcatgccctgccacaccattatcaaccgtaatgattaatgaaacatcttgttgttcaataaaatatttataaacactttgattgggaccgtaaccatctgtaaagcgatttgggagataaacctggacttcagctcccatcatatctaatgcttctttcatgattgatgctgatgtcattccatcagcatcatagtctccataaactaaaatagtttcattattttcaatagctcgtctaatacgattaacagctttatccatatcatttaacaaataaggatcatggagattttccaaattagtttgtaaaaaatgatgtaattccgctgatgtcttaatacctcgcgaataaattaaggaagccaccgcttcacttatcttttctttttttgaagcctcaaaaaagccagcgtctggcttttggttattgaggacccaactatacttagcagatatcatttataattgaatacctttctggcaaaataatcagctgtttttggaaataaactataatatttatgcgcaaaagctaatataaaaggaagatttaattctctcttattttttccaagaatagaaactacttttttagatactttttctggtgttagagcaaaacgacctatacttgctaaataatcaccacttggatcagcctgagcaaaaaatcctgttttgattggtccagggtttacacttgtcacataaacatttttttctgctaattctaaacgaagagcattcgaaaatccaacgacagcaaacttactagccccataaacgctagctttacttgttgctatgaggccagccatgcttgcaatattaacgatatgaccagattttacaagagacatcttatgtcctatctgacgagctatagacatcgttgcaaatgtattcacagcaaacatgtctttgacttcttcatcactataatcccaaaattctttaaaagaaccaaatccagcattattaattaaaatatcaatttgaccaaattcaccataaattttttcaatcatattcgttacagcattgtcattagttatatctagtgataaacataaggtgtttggtctctttccataaagcttttcaagtttttctcttgatctccctgtgacaattaaatggtcgtcttggggtaattggttaataattgcctgtgctaaaccaccagaagctcctgtaatcagtatcgttcttgccattttatatacctacttcttccaaatctctaacaagatgggtatttgaaaaaatcgtctttgcatcttcttccatttgccaacaatctcgccccataaaacgagcactaacatgatttaataatagtcgtttagcatttgcttgtttagcgatatcagctgcttgcatattggttgaatgcccatgcgatttagcaattcgctcatcacccttaccataagtagattcgtgaactaaaacatcagcgcccaaagctaacctaatacttgcatctgtttttctagtatctcccaaaatagtgattactttaccctttttcggttcagaaatataatctttagcaataatttctctaccatcttctaaggtaacattctcaccatttttgactttcccaaaaagaggaccaaatggaacacctgctagtttcaatgcttcagcatctaaagtgccctcaagatctttttgcacaacacgatatcccatacaaaagatagtatgatctagcttttctgcataaacggtaaatttatctgtttccataatttttccgagtgatgattcatcaaactcgtgaaaatggattcgataaggtaaacgtgaacctgatgtccttaaggcagtcataacaaaactttttataccaaccggtccataaatatctaaatctgtctgctcttcattggcttgaaaagcccgactggataaaaaacctggaagaccaaaaacatggtctccgtgcatgtgcgtgataaaaatttttttaactttacgaggtttaatcgtagtttctaaaatttgacgctgtgtaccctctccacaatcaaacatccaaacctcgttaatttcatctaataatttcaagactaaacttgaaacattacgagctttcgctggttgaccagctccagttcctaaaaattgaatttccatacttgttgacttttttataatccttccataacttaataaatttaattagtagatttagtatcaatataaataactgactcacgtccttgactagaataatagtatttacctgactttgttttaaccaactctaatagctcttcttgattgaaactagttattttaataatatcttttttaagttgtaagacattccctagtaaacttgtttctggtgtaatattttgagattctgtttcgtcaaaatctatttttgccattctgataccagaccgatctcgatagactttatattgaggaaaaatctgtgcaatttctaagagtaactgcggtgtaatgacttctttaacttcagaaaaaacactcgcttcttcttgatcatttaggtaagcaaaaccaaatgattttcctgataaattcaaacgaataaaaggtttttcttcatcaaacgataaatgttttggaaacaagcccaaggctttggaaagatcaaaatagtaatcagttgcagcttctggcccttgcttttgatatatttcagcaaaataagcattaatcacactaggaggtggggtgataaaatcaagtcgttgctgcttagagaggccatctagttttttctctagataaactttatctaagctcgtaaaaccaccataagtcaaagctaaatcaatataatcaatcataaaattcttccagcttccatttttgtttaggagaaatatagcctgtaatattctcgtattcttcttcaaaggtgtaggtatcaagcaatgctattttattgagatcatagagcttatatgcttgattttgatgcactctaatcgaaaattcgtcaaagatatgtcgtatttcatccacaataagacggcgtaataaatccttactcccttgttttttggctgcaattctcacatttggaaaagttgttgcattcagctgctcagtgacatccatcttgttgtatatcgctaaacgaggaatatctatcatatctaagtctttaagaatctccataacaactttttcgtgttcttcatgattagggtcactagcatcaataacatgaaataataaatcgacatgtcgactttcttctaaggtagacttgaaagccgcaactaactctgtaggtaaatcttgaataaaaccaacagtatctgttaaagtgacttgaaattgattttgtaaatagatctgcttggttgtagcgtctaacgttgcaaataattcattggcttcatattgcttatcatcggttaaaacattcataatagttgacttgccagcatttgtatatccaattaatccaattttaaaggttgtcgaatcaacacgtctttctcgaactgtctcgcgatttttttctacaatcttcaattgtctttcgatatcagaaatttgatgacgaatggaacgacgattcaactctaactgagattctcctggacctcggcttccgattcctcctgcttgacgactaagcataataccttgtccaactaagcgtggtaacatatatttcaattgcgctagatgaacctgtaattttccttcatgacttctagcacgcatagcaaagatatctaaaataagttgcatacggtcaataactttaacaccaagttcagcttccaaattagagttttgtcgcggagtcaaacgattattaaccacaacggtatcaatctcatctgcttctacaatagcttttatctcctctaatttaccagatccgataaatgatttactatcatatttatctcttttttgataataatgattaacaacatttgctcctgctgtcttagctaagctagcaagttcttccatggacatttcaaaattctcagtatcttgaagttctaccccaactaaaataacacgttcttgctcttctttagtttctatcacctataatctcctttcaatatttttttcttgttctaaatacgtaatctttattataacataatgccctttaaatgcgagaaacggctttatttactttgatgataaaaaatcactgacttttcgcttgattttttgttgataattttcctcaccaaccataataaattcgacattcatacggtttctaaaccatgttaattggcgttttgcaaaacgtctggtattttgttttagtttatcaacagcttcttctaatggtatttgctttgaaaagtaaggaaataattctttatagccaattcctttacttgcttgaacactcgggtagttatcgtatagccatttagcttcatctaagagaccattgtccatcatcaaatcaactcgtctattgatacgatcataaagcacctgacgatcatcattcaatccaattaataaaacatcatacggactttcactattttgcaaatcattcccaaacttcgccaattctaatgcacgaatggcacgtcgacgattaacttgtggtataataatggattgttctgtcaacttttcaaataaatcttcatcacttagagactctaatttttcacgataggccataagagtttcttgattgacttcgcctcctaaatgatagccctcaaacaaactctgtaaatataggccagtacctccaacaataataggaattttccccttagaaataatcgtatcaatagctacttttgcctctttgacgaaatcataaaccgaatagttctcatttacttcacgaacatcaatcaagtgatgataagcttgttcttgctcttctttactagctttagccgttccgatatctaacttctgataaacttgctgactatcaccactaatgatttcgccattgaaagttttagctaattcaattcctaatgctgtcttcccaaccgcagttggaccaacaactgctataagtttgatttttctcatgatacttctcaattctataaaggtttttacttgaaatttaactagtatttcgttaccataattatatcatagatagaagcagagtcttcatcatagattggagaattattatggttaaaaaattcgcatttgctaaaggaatagcaacaggagtcgttgcaacagctgctactcttgcaggtgctgcatttgctatcaaaaaaacaattattgaacctgaggaagaaaaaatagcttttatcgaagaaaatcgtaaaaaagctgcacgtaaacgtgtctctcattaaataataactcccttactagctagtaagggagttattttatattaaattgttcgccttaaaaagaaaatataacgtaccattactatcataacaataagagttgttgtcccaatttcaaagtggactagcccctgtatatcaactggtaatgatagatgctgaatacttaatttaagtgaggtagctgagataacaagggggaaagtaaaggctgagaaacctggtgtaaaatcaccaatcagtaatttaggcacctgaaaaagaatgaaaaaataaagaaattgtgccattacgattaatagcagtaataaacctctatttggtgacacaaaactattgacatatcccgctgtgattagcgacattggagcgcaaatagtagttatattaggcttaactgccgaaggtagcccgattttatatgctttaatgaatagaaatggtaataatactaaagttgcaataaaaccataccaaaagactattttcccaatagtaaattgtccactaattggtgctgtcaggctagctacccctataccaacatagaggacagaccaagaaggaaaaagattagccatcgaaaagtgtctcaaatatttccatgaaaaaatagccatatgaatgattaacgcaataaatgacaaccaccatacaccttttgacagaactgctacccatattcctaaacttctaaataataagatataggttgataaaatcatacctgccataaaaaaagtagtaaagacagaagcaatcaaaggattgcttaactccttcctgctttcttttttattttttaatattcctttgattaaaaaaatccaaaaaacaagtgctactagccctaaacaatagcgaacataggtgccatatccctctagaaggttccccaaagctaatagccctaatactaatcccgccatcactaatggtggtttttcccaatttttcatcatatacctcataaaaaaacgtttacatctattataacacaattagattttgctgataagtgattttattaacttaatgaaaagaagctagtccattgactaacttcttttttaagctcttctaaagtttgcttttattttaagtgacgattcctctttaaagagagacctactagagcaagtagacttgctagaatgcttattcctactacacttagtatttttgatgacttatctccagtttttggcaaattagcttcatttgtcagatatgaatcggccttcttagaaactacaggagttattgaggtcttattagctattctatttactttttctaccgttttagattccttgaaagattgtgttttgggataatctgcttgcaattcctccttagggctaggagcaactttgccaactttaatcacaattgctgttaatggatcaatcagcaaactatctttttcaaaatgaacacctctaggagttgagattggtttaatccccgcttgatcagcatcaacaattacttgcccttttaaaaggtgtttatatttttcacctagtaaaacgtttctagctttactatcagcattaacaaatactgcgtaaatatcacctttagaatctattgtttggtaagcaataaccaaatctttttctttaatatcaccttgacctacctctgtaatcaagctaacctcacgatcaatttctgctttgctcaattttcggaaagcatctgttgaacgccttaatgtgattaaacctgctgtataggcctgtgttttcgttgaaattgggtgtttgttattatctgtggctgctgcccaatcaaaatgattaatggcatctgaagaatcatatgaatcatgaataaaatatgggtattctttaacagcttcaataagtgttgctttattaggcaatttgtcatctgaaacttttgtcatgtaatcagggttaagtaaacgcttcgtacgaccatactcttgaccagaatgaatgaatgctgtcccttgagatgttaaaatcattacatttcctaaacgcagacgtctatgaatctcttcttcagctaccttagggtctttattaattgattttgcaatcacatcatgcaaggtaaggttatcatgtgcagcaatatactgcaccacatctcctggcgaatctgcttcaaaattcccaggttgtgctttgatatttttaaaaataccttgtaaagattgtgggccacctgtgatgaaagctggagtaccttcatttggaaaaccagatttcaagctattacgaatatcatctgaaaagacgccaactgtatcggttgacttcatccaatcttggtcagctggtttaaccggctgaccttgatcgccttggaatgttctccagccctcaccaatcataatcatattaggattaatagctttagcttctttataagctaattcaatcgcagccgcatcatgatctcccatcatatcaaaacggaaaccatcaactttaaattcacttgtaagatatttaatggaatcaaccaaaacacgacgactcattgcatgagtggttcctaaacgtccccctccaaaactttctcttggtgaaccatcttcattcataaagtgataataattaggttctatatcctcaaagagataagtttttgcagtgtgattatagacgacatcaagtataacccccatgccacgtttatgaatatcatgtattaattgttttaattcggcgatacgtgctgatggatcttttggtttctctgaatacatcccagaaagagcaaaatagctctgtgggtcatagccccaattgtaattattgtctgaggaagtgtaagctgttgagcgtgacttatccatttcattaacataaaaataactcaataccggtaaaagctgaatgtgtgtaactcctaatttctgtaaataatctagtttctctgaaaaggctgcaaaggtaccaaattgattttttaattttccatccaaagatcgatcagaagtgaagtctcttacatgtgcttcgtatataacagcatcttgtcttcctttaaaattagcaattttagcaaaacttaaattttgaggtccaagttgacttggatttacaaaagctgctttagccgttttaatatcatcattaacagtattactatcccactctgctaatgactttgcataaggatctaaaatcttaaccttatccttacctctttttatttcgtaaagataatagtaaccagtatagtttttaatacctaatttagtatcaagtatcgtctgccaaacacctttattatttttcataaggggggtagtcgctacaaccctgttttggttatctttgtcataaataatcatagtgacactatcagcactcggtgaccagaggctggcttcaacttttgaaccatcttgattgagaactgcacctaaatttccactataagcataaagttggtctttaaattcccaagattgccttgtcatgacattgttaccattataagatatgttgaaatgaccttgtttaggattaaagtcgcctttgattattaaaagagatttactagtatcgagagtgatatcagaaatttgtatagcattttgatttttatcagtcactttcaattcttttaaaatttcagttttatctaccccatctagagttgtaaaacttgcttgaatacttgttaaatcaatttgttgggcatcctttagctgcacttgatcaatgtaataaggattattataaacctttggatccttatcttttacaaaaatttggttatggttagctaaatctctaaaaacatagtcgttgggttgaactttcactgcatctcctgtcttactttcatctaagattagaaaaccaatctctttggcgttagtttttagtgatacatcaatataccttccatatagtccttgattcacaaaattactaccatctggccaagttgttgagggggttgcaacatctttaaagagccatgctgataagtggtcatagttactagaggaactcaaatagttaatacggacatacccttctttgaggggttgataagtatgtgtaccgtacttttcatcaatccaaacttggttcatctcaggtcgtaataatggaatatgatgatcgccgcttaaatttgtccctgctttgttattaattaaaaaagatatttgttttcgttgtttttcagataatttaaaatcaacataataaccgtaatcatctttcttagcatcagtcatagggatagcaccatttggccaattactagacggttgatcaacatctccccatatccaaagtccagtgctttctacaggatgaccttgaggcaattctttaagatgtagcctaaagtaaccattttcaatccgtggagcttgattagctactttcaaggtagggcttggagcacctatagcttgagaagttttgtcgggagtattttgcaatgtagatggtgctacttttaaatctaaggtatttttatctgaaacaggacctttattttcttcaagcaggcttgtcgccttatccggctctgtcactcccttttgagtgtcagtttcatctgatactaattgcttggtatccggcatatctgagggtgtcacaaccgtctcagagtttgagtttatgtcatcttttaaattagtagattgttggttgtcaacctgattaatattcgactctgcaatcgctgtatttgcaggagaagcacttacttcttcagcaaatacctgtggactatgaagaaaaatacatacccctgttgcaactgaagctactccaacacttaactttctaatcgtgtattgagtttgtttatcaccaaataagtcttttcttttcatatcattctccttttttaatgaattgttaccaataaaatcataacaatttacgcaagcgcttgcaacaagtaaatgatttctttatttttttgaaattttcactaaaactatcaatagcattacaaaaaagctaagcaatattgcctagcttttttatcaaaaatttcctcatatcaaatgattttcatcaatttgatagtcctttagcagaccttgaagtctatcaaattcataacaaaaatgttcaggaatatgaccgtcagagcctatagagtattgtttacaaccaagctgtttgagtatctctaaagcatagcgataaagtttttcattcccatatagataaagggatttggtatttagttcaaaagctaaccccttagataacatctttatgaaaatgcgcttcaattgcgtttcaaacggttttaaatcttctacatctaagtttaacttacgaaaaccataatcaaagtgagctaaaacgtgcgcttccacacggcctatggcaaattccatacgattaaagtaatctgctaaaagctcctttgttggtactttcagagcttcttcttgcagataatcatacctaccattatgatggattgacaatagttttaaatcaaattctttattttttaaataatctaaaatatctgattccctatctttaaaataaccgatttcaattcctttttaaatcgatttccatatttctgattaagataatctattttttgacaataagcactataatcaggaacatcgtcttgaccggtgtaaggatttgataaatcaaaatgttctgttgtgataaattcacctgtaaaaccattaatatagtcctcaaatgccgtttgacaatcataggaaaaatacgtgtgtagatgattatctctcataccaactcctatccttaatcttttaaaatatctgctactatcttttgtaaatcaacgattagatctttttcaaaccatggattcttctttagccaaatttgatttcgcggtgatgggtgaaccaggggtaaataatcgggtagatagtctttgtaagctttaactgtttctgttagatttttatgtgcggagcttccaagataatatttctgagtatactgaccaactagcaaggtcaattgaacattaggcatttcttttaaaataagagggtgccatttctccgcaaaaccttttctaggggataaatctcctgattttcctttgcctgggtaataaaaatctaaaggtaaaacagcaaattttccagaatggtaaaatgtctcttcatcaactccaagccactggcgtagacgatctccagatttatctttccaatagagtcttgcttcttgagtttttaaaccaggtgcttggccaacaatattgatcctagctgttttaggagcagcaaacaaaggatcaataccattttctgtataattttgattctgtgaatcactttttattgctttaataattttttccaagtcagtcataaagtctccaaatctaaccttatgaaaagaggcaaagacactttcatgtcttcaccaccctttatcattgatcacatatttagtttaaggattattttatttgattaattcatagatagcttctgcgtagatagcagccgaacggaaaatattttctaaaggcatgtactcattagcttgatgcatagtgttttcatctcctgggaacatggcaccgtatgcaacaccccgttcaagtaagcgaccaaatgtcccaccaccaataacctgttcatgtcctttaagaccagtttgcttttcatagacagctagtaaggttgatactaattcatcgtccataggtacatagtgtggtgtgtgttcatggtcagaaagagtcactttttcaactccgttaagtttctcaagcttagtttggatagttttagcatctgtcccttgtgggtaacggaaattaagagcgatagtattatcatcattagtttcatcaaactggaagacacctgcattcatgctcaatggtcccatacagtcatcttcataagctactccaagtttttcacctgagaagtcttcgtgaataatgttggctgtaacatctaagaaagcacgagcaggaccttcaaaatcaaattgacttagataaagagctaaataagtcgccccattaacaccttcttgtggtgttgaaccatgagcagatttaccataaactgttgctgtatattgctcatcttctacagataattctgctttcaaattatgtttacttgcaaaatcagctagactagccccaagtgttgtctgatctaaatgacttgtgaaacgtgctgtggctgattctggaaccatgttttcgcgaagtccgccagaaaagctatgcagtctaacagctcccttattttctcctgaaaaatgtaaatattcagtaatattacctttttcaccatttataattggaaattctgcatctggagagaaaccaaaatcaggttttggaagaccaacatgttcgaagtagtaatccatatctccccatccagattcttcatcagttcctacaacaaaacgaactttcttagatgttggtagcccaagctctttaataatttttagagcataataacatgccattgttggtcccttatcgtctgatgagcctcgagcatataaacggttatccttgataactggttcataagggtctgtatcccaaccgctgcctgcaggaacaacatctaaatgcccaaaaatacctagttcttcttcgccttgaccaaatgtaaagtgtcccgcataattatctacgttttttgtttcgtagccatctcgctcagccatctcaaggaaaaattccaaggcttttacaggtccaggaccaaatggatgctctgcatcagcttgtgaatcatcacgctccgagttaatgcgaagaagatttattaaatcgtccatcaaagcgtctttgcgtttgtctacttctgctctaaaatcaattgtcattacggcaactccttctataaaatattatgtagtttgtgcttaaaaattaacgtttttcaataatatgatcaactggcaaacgataactaggttcaaccttttcatcactataaccaacagtaattaatatttctggtctaaaacgtttatctatctctaagacatcattagtaatcgctttatcgaaccctaaaatcatattagaactaataccttgatctgtcaaggcaagtactaaattcatagcaacgatacctgcatttaaagagagatactctccagtttgtttttcactatataaagcatagcgtggtggtagagtttccatgtaataaccaattaaatcatcaggaagagatctacgaccaatacgagctattttccgtgatctctgtcctaaatctgtatctgtaaataaagcaataacatactgcgcttgattaatttggttacaattactttccggtaaaccttctgctagagcagattttttttcttggacaacgacaaacttccaaggctgaatattattagcagatggcgctaatgtcgcaatttcaatagcagttctaacatctttaaagtcgactggtttatcattaaaatgtttcacagcatggcgcttcttatttaattctagaaatttcataaaaacctcctattctatttgattttccctactattctatcactttttaaaatgcgtttcagcttttgaaggcaaaattgataaaaaagtgaaaccggtttgaaaactaccataaaaaacaaacaaacttgtggtacaatatctaatgactataaaaaaggagctattcatgctacgagcattaaaagaagatttttttctaaccttaacctctttaaaaaatcaattttgggtttacattggaactggtatcttaatccaaactttagttgcttatttagtaaaaggaattctgagttttatctttcgtcggatattgatattgtcaaatactcccgcagtgactaaagacaattggactttactttttaatcatcccttagctttattactctttatactttatatcgtaatcctaattgggttcatctatactgagttcgctatctatactattgccatactgaaaactgaattttctctcagtatcaaaaaatggctaacaatctttcctaaaaaaataaaatcacttttaggaccacagctaatttgggtatcaatctacttacttttgacaattcctctagctaaccttggtctaaggtcaagtatactagagcatcttaaaattcctgactttatttctggcgagttaacaaagacagtctttggaaagataggttactctacccttttactgcttatttgttacttaaacctttgattaatttattttctcccgctgaccattttaactgactacaatgctaaagaagcacttttagagagttggaaacttagccgcggaaagcatcagtggcgtcttctaagtaaaattattttaaccagtttatttatatctgtaattggaacagttgcactagctgttgttgctggtacattttcattcattgatcattctggaaacaattttcctcttcaagccactttctataaccttttaaaatcaatactttttgccgtaacacttcttattaaatgtttaatcataagtcacctattagcagatattaaacaaaataaaagtattgttcaacaatggagagcttggaaaggcgtccaacataagcaaaaatttaaacacattgcttgtgttatcctagctctagctattggtaccactgccttaaaaaatgctatagctctggctctcctacaagataacatttcaattaaaaaagaattaatagcccatcgtggtgatacatcacatggcgttgaaaattctattgaagcattaaaagcagcccataaagcaaaagcagattattcagagatggatgttatcatgacaaaagatcataaattagtagtcatccatgatgataatctcaaacgactctctggtatgaacaaagatgtttctaaactaactttagatcaagttacaaaaatcccaattcaccaagggcgttttgctagtcacattccatcatttacagaatttatgaagaccgctcagtcactagatcaaaaaatcatgattgaattgaaaccgtataatcaaaacctcgatatctatgcggatgaatttatcaaagaatttaaagagcttcgtctctcaaccaagcataaagtaatgtctctcaacttgacactcattgaaaaagttgagaaaaaattgccacaacttgatacaggttacctaatcccactacattggggaacgcttcaaaatcataacgttgacttttatgggattgaggaattttcatacaatgattggattgcatatctcgcccaagaatataataaacagctctatgtttggactattaaccgtgataaccttatgatacgttatttacaaagcccagttaatggaatcatcacagatgaactcaaccttttcaaggtcattaataaagatatcaaaaatagccctaattattatcaaagagctctccaacttattgatagcgagggttaaattaaataaaaagcttagtagaacagtatctactaagttttttatttaggaggatcattaagagaatctcggagactttctgcaacagtcctaggaataccacacataataatgtcctcaatctcagctttttggatattaggtaagcttttaaaatgtttcattagcaattgtttacgttttggtcccaacccagtgataccatctaattttgaagaaaaggaatttttggagcgtaattgacgatgaaaagtaatagcaaaacgatgtacctcatcttgaatacggtgaagtaagaaaaattcttctgaattacgcggtagctctactacttctaaaggatctccaaaaagtaattcatgtgtttggtgtttatcattcttttgcaaacctgcaataggtatggctaaaccaaattggttctcaataacatcacgcgctatatttacttgcccctgaccaccatcaattacaatcaagtccggaggtgtcaagccatcttttaaaaccctactataacgccgatgaatgacttctctcatactagcataatcatctggtccgataacagtcttaattttaaactttcgatagtcttttttacttggctttccattcacaaataccaccatagcagctactggacttgtcccttgaatattggaattatcaaatgcttctatgcgtactggtttagggatattaagaagattacctaaattttcaattgccccatgagttttacgaatatctttttccagtaagtcaaacttctgttgtaaactgacacgagcattttttattgccagatttactaactgtttcttttcaccacgttgtggtttaacaatcttacagcctacaattgtttcaaccgacttagcatcaatatcctgtggaataaagacttctttgggtagaaaatgttttgtatcttgataaaattgccctatgtaagttagaaaatcttcctctggttcattataataaggaaacatattcacgtcacgctgaatcaattttccatttcgaacaaaaaagacctgtacacacatccaacccttatcaacgaaataaccaaaaacatctctatccttcatatcttgatgaataacacgctgcttagtacgcaacaaactaattgcttcgatcaaatctcgatattcagccgcacgctcaaattccatagtcatagcagcgctcttcattttttcagttaatccgttaacaattttattatctttaccattaagaaactgttttacatcttctctcagactatcccaataagctttattagtttgacaaactgtatgtgcattgcattgccctaaatgataataaaagcatactttatttgctggattagtacatttcttaaaaggaaagagcctatctagtaaccgcttaatctcagttgctgccccagaatccggataaggtccaaaataagtgccatctgatttttttacttgacgtgtaatcataagacgaggataacgttcatttgttattttgatatatgggtaagacttatcatctttcaatcgaatattatacttcggcatattttcttggattaaattaatttccaataatagagcttcggtattagatgttgtcacaatgtattcaaagtcttcaatctcagagaccaaaagttctgtcttagtattatgactcccatgaaaataacttttcacacgattcttaagatttttagccttacctacataaataattgtcccattcttatctttatgaaggtaacaaccaggactgtctggtaacaattctagcttatgtttaatcagttcattcatagaactattataacaaaatgtactgtaatctttacgaaataaatactattccccaacatctattgtatcttccaatacttgaataaaaccccaatactcctagtctaagcaattattttatgttacactttaaacaagtgaattattgaggagtttttatgatagacgttgagaatattcttgaaaaaatgaaacctaaccaaaaaatcaattacgattgggtcatgcaacaaatggttaagcagtggcaagctagtgatatccgtccgaaaattctgatgcatgtttgctgtgctccttgtagtacatatacccttgaatacttatcacaatgggcagatgttaccatctattttgctaattcaaatatccatcctaaagatgaatattatcgccgcgaatatgttactcaaaaatttgttcatgatttcaacaaaaatactggatattctgtacaattcttatcagcaccatatgaaccaaatgaatttttcaaaattgttcatgggttagaagaagaacctgaaggtggggatcgttgtaaagtttgctatgatttccgtcttgataagacagcggaaaaagccgttgaactaggttttgattactttggcagtgccctaactattagtcctcacaaaaactctcaaacaatcaatactattggtattgatgtccaaaaaatttatgatactcagtatcttcctagcgaccttaaaaaaaataaaggttaccaacgttccgttgagatgtgtaaagattatgatatctaccgacaatgttactgtgggtgtatcttcggtgctaaagatcaagggataaatcttctccaaatcaaaaaagatgcgaaagctttcgtgagtgataaagacggcaaagaagaatttcctaatatacgcttcacatttaatggcaagtcaatgtaaatgataaaaaaagacttagtaaagaactaagcctttttggtataaatcttgtcaaactttaataatacaacttcttaatcttttgcagacgttggtttagaaatagaccacaaacaaaaatacctgtgattaaaccaatccaataggcaaaaggacctaactggctatttttttctaagataaccgctaatggcaaagcacataaccaataagagcccgcaccgatcataaatggttttgttgtatccttatagcctcgtaaaatcccctgtacaggagctgcataagcatctgcaaactggaaaaagagactataagttaggaattgagctgtaatagcgacaaagtgagggtcactattatacattgctgctacattctcacgaaatagaaataaaaatagtaaggttcctgatgtaatccctaccgctgttaagcgtcctatcctactataagtgtttgcgtcctgaaagcgctctgcccctacttcaaacgatattgtaatagctagagcagtggaaatacttaaaggaaaggcatacattaatgatgaaaaattcatagcagcctgatgtgctgcaataatgattgaagaaaattttgccatgaataagcctactactgcaaaaattgcaacttctgcaaaaatttgtaaaccaatcggtaatcccaatcgaatatcttcaataatcaaaggagcttttattctttccagagtccatatatgatatgttttaatttgaggatgaagtgacatcacaataataataacaataaaaatagcccaataagttaaagaagttccaagacctgcccccgcacctcctagtctaggcataccaaatttaccgtagataagcatataattaaaaaatgaattaaagggtagaattaaaagcatcagatacatagataaccttgttaaccccaatgcatcaaagaatgaacggcaaatgctaaacaacaccagcggcatgattccaatcaacatataatttaaataaccacgaccaactgctagaacttcatcttctaaacccaaactccccaagacaggttgagcaataaattgcatgattaaaaataatattaaggacagtatcaaacctaaatatagaaattgatgaaattctgtgcgaatttgttctttatttcctctacccaaatgttgaccaactactggtactaatgctgaaatcatacctactaataaagcgaaaaacggagtccataaattactagcagttgacacacctgccaaatgtagctgactatactgtccagtcataaccgaatcaataaaagtagctgaaaaattagcaaattgataaatcaatactgggataaataatttcaaaaataaaacaaatttttccttatttgtctgagtttgatacatcttttttctccttttcaccttaatcaatttattttagcttagctaggatactctgtcaatgctatttaaaaaggttgagaaataatcctcaaccccattttagctaagctcagtattgatttgccatgtcataccatatttgtcagtcacatttccataagctggactccacggaactgcttgtagaggcattttaatgttcattgcatctcgagaaagcttattgaataactcttgcgcttcttctacagattccacaattaaagctgctgtcatattttgtccaatttgaaaatcaaaaataggattattgtcagaaagttgcattcgaataccatcaatattaaattgagcgttcataattaaatgttcaagttctggcggacaatctggccaaccctgtgcaaaagttgtgacgtgttctgcttttgtattaaaagcctcttcataaaatgtaatagcttcggccccacgaccattaatattcatataaatttcaattgctttcattaccatacctcacttcatattatccaaccaacgctgcatcagagtttcattttccccttttagggtaaaataagaaccacgtattatacctgcgagttttgacttttgacgagcaaacttaaacttgtccgctaattcaataggaatatccattccatctgataattttaaacctacagctctctttttaggattatctaattcatataaaatattaatggctaaaccatcctcatagaaaacatgtgtccataaaatacgattctctaaaaaaagctgtgaaatctctaaaggctttgcagcaaaaacaaggttacgttcattttttagaaggtgattaatatctgccatcaattctggatagtctgatactggaaatgtttcgtaggctactttgaatttattccagaaatagcgagcttcatttgcacgcaaaccagccaaggcttctgccactggagaagtctccaaacctttagttgaaacggttttaaagtcgataatcatgttctttcctttttgattaaaatcttcgataatttagtatactcttttttgaagaaaaagtacattctaatcacttataaaaagtagtacatttagaacactaccacctcagtaatttcttgacctttctctacttaatacttataattaatctagacttaatgtcaaagcatcaatcaaggtgtaaacctgattcacctaaaaagctgatggagctaaacatgaccaaaaagatattcttatttatctgcgctactcttttagtaggaatagccttatatacaccaacaacttctatttttaatcataacaacgtttatgctgccaccaagaaagcaaaaattaaatttaataaaactcaaaaaaaaattgtcaaaaaagcaagagaatatgctaagtctggccatatgtctaaagatagtatcattgaaaaattaaaaaaggattctaagaaatatcgtcaagaagacatcaactttgtgattaataacctcaaggttgattacaaaaaaaatgccttgatttctgccaaaatttattcaaagaccatgaatttatctaaacaatctatctttgaacagctctattcggagtctccagataaggcaacccactctgataaatttacaaaagaagaatcccaatatgctatagaccatctcaaagtagatttcaaagaaaatgctcttgagactgctaaaagttatcaaagtagttcttctttatccaaagaagaaatctataaacaattgacatctacgctgggcgataaattcacaaatgatgaagcccaatatgctgtagatcatttgaaatgatgacataccaatagtctatccttatgtaatagaattgatagcttatgctaatattccagctgtaaaatagcaagaaccctcctaagtcttaatgaacttaggagggtttttatcaatatgaataggttacactaaactagacagaaattataaagtgttctacacttaagaaaaactggagaaaaaccatgtctagaaaagtacgtcgtcacttcaccgatgattttaagcaacaaattgttgacctttacaatgttggtagaaagcgtagcagtctcatcaaggtatatgagctaaccccttccaccttcgataagtgggttagacaagccaaaacaactggttcattcaagtctattgataatctgacagatgaacagcgggagctaattgaactcagaaaacacaataaagaactcgaaatgcaattagatatcctaaagcaagcagcggtgattatggcacaaaaagggaaataatcactgctaataaggataaatacagcatttcaaagatgtgtcgctggctgaatatgccacactcaagttattactatcaagccgtggagtcagtatctgaaacggagtttgaagaaactattaaaagaattttcctcgatagcgagtccagatacggatccagaaaaatcaaaatatgcttgaataacgaaggtatcacactttcacgtcgtcggattcgacgcattatgaagcgactcaatttggtttctgtttatcagaaagccaccttcaaaccacattctagaggcaagaatgaagcccctattcccaaccacttagacaggcaatttaagcaagaaagaccactacaggccttagtcactgacttaacctatgttcgtgtaggcaatcgttgggcttatgtttgcctcatcattgacctatacaaccgtgaaatcatcggcctgtctcttggttggcacaagaccgctgaactcgttaagcaagccatacaaagcatcccttacgccctgaccaaagtcaagatgttccattcagatcgtggcaaagagtttgataatcagttaattgatgaaatattggaagcctttggaatcacacgttcgcttagtcaggctggttgtccttatgacaatgccgtagctgaaagtacgtatcgtgctttcaaaattgaatttgtttatcaagaaacctttcaattgctggaagaactagctcttaagactaaagactatgttcattggtggaattaccaccgcattcatggtagtctcaactaccaaacaccaatgactaaaagattaattgcctagaaaaacactttataaatgttgtacagaaaagtgttgccttttcacttaataaaagaaagattgaaggaacacttctctttcattccgaccaagggtcacaatttaagtccggggaatttagaaaaataattgatgacaacaataggcactgaatccctaaaatgagacaaaagaaaaacactcctgttgaaatttagtaaactagaaacaggagtgttttattatggttaaaaaagcatattcatgggaaactaagctggcttgcatcgatatgaagaaagcaggcaagtctaacagagttattatggagactttaggcatcaaaaataatagtcaaatctatacttggatgaaatggtacgaaaacgaggagctttatcgttttcatcaaggtgttggcaagcaatatacctacggtaaaggcttggaacatctgtctgaagtggaacaattacaattacaggttgacctcttaaaaaagtatcgaggcttgataaggaaatcgataaagtaagtcttatcaagcttgtggaagactataaaaacaactacccgatagttttcattctagactgttttaaggtcaagcggtcgacctattaccgttggaaaaaggagtatgagaagccgcaaaaaaagatgaccttattgaattaattgaacagctctgtatggagaatcactttatttatggctatcgtaccattacacgattgctcaaaaaaatccacggattgactgttaatacaaagaaagtctatcgtatcatgaaaaataatggctggctttgtcggacacgtaccaagaaagttcccaatttgggtaaagcttattatttaacagataataaattgagtcgggatttccatgccgataagcctaaggaaaagctcgtaacagatattacctacctatatttcggtaactgtaaattgtatctctcatcaattatggatctctataaccgagaaattatagcttacactatctcagattgtcaggacacggattttgtactagacacccttaatcagttaaaattgcctaaataaaggagcaatcttacacagtgaccaaggctcagtgtatacttctatggcttactaccaggcttgcacggaaaaagacattatccgctcaatgtctcgaaaaggaacacctgcagataatgcctgtattgaatggtttcacaccgtcctaaagactgaaaccttttatttccataataggagaaaatacaacaaagatagtataacaaatattgttaaaaattacattacattttataatgaaactagaattcaacagagattaaacgaccagtcgcctgtacagtacagaaaactgattgcctaaaagtgtttttcttgcgtctcactattagggtgcagtgccaatatcatgcattctttttctaatcctggatatccttatgataatgccgtaactgaagcatttttcaagtatttaaagcatagacaaatcaaccgaaaacattatcaaaatatcaaacaggttcaattagactgctttgaatacattgagaatttttataacaattacaacccacatacggctaatctaggactaacccctaatcagaaagaagaaaattattttaacgcaataaaataacacagttttctgtctacttatttgacattagtccaagaatcctcctctttttttactattctaacatggataccatttctttgcaaaagaaaaccgctattatccaacttttatcactactcgttacatagaatgacttcaaaatcaccgtaacttgctttgacaaagcagtgctttaacaatgagatcttcttttggttaagggtttatttgttgaagtgtcttgatatcataagttaccaattcaccatttttattataaaattggacaccttctggttggaaaatgagatacttaggatcgatattagctttttgtgctaattgattgatatgatcttctagggttgctctatctagaccatagtctggtaaactgtctataaagtcatctgattctttttcttctttactggcttcacttggctgttggttttcattgctcttatctgcctgttgcttttcttcaggtttatccgtatcagtagcatcaccagcatttttctttgccaataactcttgagcttgttgccactcagcttgggatagatcagatttattaatggttctcaatgaactgccatctgctcttgggatgctaaaggagccatctttccatacaaaagtttcttttgccaaaacatctcgtggatcgaaaatatagccgtctggtgctgcaaaacgaccttctgctagggctttttgaacttcttcagcagaatggataatttgccagtttggcataccagcacgtttatcaagaggcgtaacatttggaatgaccgaacctgactcttcatgccctggcttagaccatacatccggacgaacttcggggtgttgcatcacatacttgattgttgcaatctgattgcgcgtcaaccatgaatacggaacgacatggatatgatcaatatgtgggataacaaacgaacttccagtatcgtaagtagcattaccagcatgcatcggcagacttgacaaatctacagcaagtcgtggctcaatgcctgtatcaacaatgtcataacggtaatgcttcttatctttaagcattagttcttgttcggcaaaggcaatctgagtcaaatcaagttgataacgagcatagaaatagtccttgccatcttttggcataatatagcccactttaccatcttttgttactttgcgactcacttttttagtgtcaaagagtggtttttctttgccttgttcctgatccaaagcagcaacaagctcatcagcttgaccttttgctttcacccagttagcgacctcatccaactcatattgttcaagttctccaaatcctatataatggaaatgatctccgtgtttagctgtaactcctgatttatccactgaatgaatggattctttactaaaaacataagcatcactcgtatcatatggtttaccatctaagccttttccgtaagctttgatgcgatgaccaagaaaggtatgtgtcacttctttatctgatggttttgagtgatctgaacctgagtcgttgtcatcagtttggccggctaagtatcgatctgctaattccatttcaagaggtgataactgacttcttgggataatatgataatgatctccatgaggcaccacatacccaaaagcgtttgatttgatcacttgagtcggttcaaaaatcaacccatcttcttccacatgacggtatttcaaatcaagacggtgtagttgatctaaaagttccttaaaggtttttcctttaaactcatctctttggtgtttgttttgtgacgcatcatttggcctaggaggcgctggatgataaccaccgttatctggctgatgaccttgtccagggttaggcgtcacatcaggaattggggctttcctacgacctggggctggtgtcgggcggtaatcagacggtctagcacctcgaccttgtttttgactccagtaggcttgtgcagcagctagctcacttggagacaaatcttttttaggaatataatgatagtgattaccatgaggtactaaataagcatctcctaaatcatcaatgatatctgtcggactaaaaatatagccatcgtctgtagtatagcgtccttgtctttttgcttcattgactgccgcaacttcttctttactgagatgggccacttgagctaaacctttttctttagcttctttagttcctttggctacttgctcagcaatttgttgtttggttcgaatgtttttgcgcttactacctggcttgaggtaaacataatagttgccattgactttaataacgtaaccgtctaagatttcattgataacgtctgattgtttaaaatggtaattaggatccgtcatcaacaactcttcactaataatcgcatcataaggaactttcccattgtaaaaatgataatggtcaccgtgtgaggtaacataaccttggtcagtaattttgactacgatctgttcagcagagatgccttcttcagcactgatttgatccatcgttttgtttgttttaggggcttttaccttacctttgctatcatcaatataggcaatctgattgtcctttgttgctagacccatatgatgcttaccaagctggtaacttccaatatgagtagctagtaaaatagcagcaactgagccgatataaccatatgttttcttcactaataatctcctttacttcaactgttgatagagcacttccaaatttgctctaagattttctagatatgtcttgtttccgcttggagcagcttcaagtggacttaatgtctttactttagctcctgttgatttcgcaatagcatgagcaattttggggttgacgttgtcttctgcaaaaatagtcttgacgttgtattctttaacaaagtcttgaatttctttcaattggcgaggagagggctcttgctctggagaaatacccgagataccaagttgtttcaagccgaatcgtttagccagataagaaaatgccgtgtgttgcgtcacaaatgtttttgagcgcacctttttaaatttttgagtgtattcttcagttagttgctctgcttcttttttgaaagccttagcctttttagtgtaactgtctttgtgtttaggatccaaatgtcctagctctttagcgatattaacagcttcctcaccagctaaaacgggatccgtccaggtatgtgggtcataaagtgtcgcagggtcaatgccttgtgtgacttccatatcttctagccctttgactctatctagtgtcagaggttttgacgcttcaaacacattaacctttgatttttttaaattagggtctagatcccttgcccaagcttctaaggtatgtgaatggtaaacaaacaaatccgcgtcataaatagctgccacatcatttacagacggttcaaaggaatgaatgcctgcacctgattggatcatcctcacatcatttaggtctccagatacttcttttgtcatcgcatacattgggtaaaagctggttacaactgacatgccttgcgtaggctgtttggggtttgctgacttatcacaccctgctatcattactaaactcacaaccatagccatgagaaaaaaaacttttttcatagtacctcctcaattataatttaaccagttattaaccagttaattttactcctttatcaatgctttgtcaatgacaactaccatcttttatcacatcaactgaagggataagcaaaaggcaattgttgacagctatttgtcctaacttctttttgatgaggtagcacaatcgagtagaggctaatctctagcccctctcacaccaccgtacgtgccgttcggcatacggcggttcaactaacttttaacgcatgtcgttcaagatagtaatctaagcaactgaccagtcctcgctttgcgagggctggttttgatatagcacgtttgagtaccgacttctgagctaccaactgatagtggtcaccccatccagaaactttatcggctatccatctagcaactcctagttttaagagtccccataggcgctttgctttcttcttccattgcttccagataatcactcgaatacgggttcgcagacgctcatctatttgtgtcatgatactcttcatattgccaagcgagaaatagtttatccatcctcgaatgacccagttcaatcgttcaatgcgagttatcaggtcaatgctccatttcctcatcgtcagttgcttcagttttcgcttaaagctctgaacgctgtcttggtgaggacgacacttccaaccttttggagatttccagaaaccaaatccgaggtatttgagtttgttcggtctgacaatcttggtcttagtcatgttgactttcaaccctaatcgcttctcaatatagctactgaccgaatgcatgacccgcttagcagctgcttcgcttccgacagtgatgacacagtcatcggcgtaacggacaaagcgaagacctcgcttttccaaccctttgtctaactcattaagcataatattagataggaggggtgatagattcccgccttgaggtgtcccgactaaagtcttatgtcgctgtccgttaataacaactcccgaatggaggtacttacgaatcagtgactccgtatcgccatcttgaatgatattatgaaccagggacatcaatctgtcttgcggaacagtatcgaagaacttttccaagtcaatgtccacaatccactcgtagccatcgtttaaatactcaagtagctgaacaatggctgtttcgcaggagcgattgggtctgaacccatagctatactctgaaaaatgtttttcgcagagtggactcaaaacttgaacgatggcctgctgaatcattctatccatagccgtcgggatacctaggttacgaactcctccgtttggttttgggatttcaaccctgagaaccggttgaggtttatagctcctctctttgatgagttgcttggtttctcgccaattttggtgaagatagtcatccatctgctcgatagtgaccccattgataccagcagaacctttgtttgatttcacttgcttgtaagcttcgagcatattgttccgagataatatcttatctagcaattctgacatgtgcgtattcctttcttttttcgttgtctgcatgatatcttacattggtgaaccttcctctagtcaatacgtaaccgcatctagttctatcagaccgtttgttttacagacacaagtgaagtaggattacttcgattagttgttcaccccttcgttccatttccattacagaaacttcatcactactatgggttcggctgacttcttgtcgttcgttgttattaggttttaccctcgacaggacctcacgggataagtcggacatctttcctcgtttactctcgtgatttacgtatataggttacgactacctatttggactttagagtttatagccccctcatccgctatatacgccttcatatcacgtttctgttcgtagagccacgatttcgctatcccttcctctccccgctacctcacgatagtcaggcttgggagtcgctattgggttcaccggtagcgggtgcccacagaggacttgcatctcagatgtacgacatgcccgtcgtactataaaaaaatagagagaaccaaattggttctctctattaaataagctcttatcagtttaagtaatactattttttagtttctttttggcgttttgttttaaatatatgagctgctaatcccaagaagaaagtggtcataactaacttaaggagatgtaaacgatttgtatccttgtcattagtcgttggtaactgatctcttgttgatgcttttgtagctaaagcacgcttagaagatcgtttctctagagtacgagaagattgacctttttgaggagttttacctggtgtttgacctgaactatctttttctggtttagtttcttttttttatctggtgtttgacctgaaccgtcttgttctggtttagcttctggttttttgtctggtgcttgatctgaaccgtcttgttctggcttattagagtggccctccaatagcttagtcactggtgtataagtgatgttaccagccatatcttcaacaacataagtaaagtctgacattttcaatggaacagtagcgccttccattgtttcagcctcttcaggaagagtaaaggtaccatcttcatttggagaaatatactctgttgttggcagatcctcatccatataagtgtaagcaatacgctcacggtaaaccggttggctggtttttggtttagatgcaagtgtcaaacgactatcttctgttgagaatgttgccgatgttgcgacttcaggtgtcgtattgtctacaatcacatcaaaatcagtgtgttgttcttttgcacctgagctaatcggcgtgtagcgaacacgataggtgtaggttccgttagcaacaactttgccgtctttatttttaccgtcccaacgcgttttttcaaaacgggttgaaccaagtgtgcttgccaagtcattgttgtagtttttaacaacttgctcggttacctcacttgtccaaacaacatttccttctttgtccaagacttcagccacaaggtttttagcattacgcaagaaagtaccttggaattggacataatctctgttaccgtccccatttggagagatcgcagcatatggtttgccattagcgtgacggtggatatagtagtggctatcatcgtcttgttttgcaaaagtacctgcaaaaatggtttctgtgatctctgaagattcgatatcctctatgttttcaaccccttctttgacagctttaataatcgtccatgggttagactctgtggtaagtgctgtaaagttatttttcagagcgtaaaactgtaatccatcaccatctaattggtctttggcatcactatttgcttcatgatagtagctgctaccgtctttgctatcatagattggtttttctaaggctgacagattgccaaaatcacctcggaaaccaatatatggaatgctcataagctcttcttttgtaggatcttgtttgaaacgaacaaaaccttctaagaaatagccatttttcatttgggcaagcaagtccttgctaaatcgactagcatcgattggaacggtgacttgtttgctgctattggctggaattgtgattttttgccatgatgtctcatacaatgctttaggagccaaggcaaagtgttttccatctactttatctgtttgaacagttacttggtaatacaactcttgaggtttatcagatttgttgtgaactgttactgttacttcaaatttatcagaaacattgttcaggtgaaccttgcttgaggtattgtccttatctgttacatacatcgttgctgctgaagcttttttagcatcgactgctcctgctccctgttggcgaggagaaaaataagctttttcatcttcatcatatagggcagttgctgagctcatcaatactttcttagctaaatcaagacgctctgatggtgtcatatcaggatactgtgtctcatattgcttttgcaacagtcccatgatacccgctaccaatggtgcagacatactagttccagaaagtttggcatacttgttgttagccactgatgacaaaatatcttggccgggtgctgcaatatccggcttaatattgccgtcagctgtcagaccccagcttgagaagcggcttagtttggtgccacttgctgttggcaataccttaggtgtcgcattgaaggtaatggttttttggggattgtcttttaataagagaccgtctcttcgactgataaaggccgcaggcatctggtcaacatttggcaattcaatcgggaagcccttgtcttgattgtcatagatcaagacccctacagcaccagcttttttagcgtttgcaatcttatctttgaaatcaatatcgccacgttcaataagggcaatcttaccttcgacatccttaaaatcatcctctttcgtaccacgattagcataagcatagtcgtaagccttgtttggctcaaaacggtttgttgaaagaacaggcatttctttatcttgatgatcgtctgttttgaccgtagcagtttcagtgagctgtttatctgggctgtaagaagcaactgtcaatgttgaatctgccgctgcaggtgtcccaaccaccccataatcaggatgatctgctagaggtagacggggcttgcccccaaagctactatcattaccagctgaggtcacaatgctaacaccttttgatttggcatagtcaaaggcttttttggtttcgtctggaaggttggcgtaagctagtgcagcattaccaaagctcatattaatcaccttagctcccaagttgacagcatctctgatagcttgagcgtagttacgagcatagtctgctagtccatttacaatttcgacacgcatcaaaagcaattgagcctcaggcatcgcaccttctaggcggtaaggttctttcatttcagatggagcatttcctgacaagatccctgacacgtgtgtgccgtgttcttgatcaacagcgtttttaccatctttactatagtcgtggtaataagcaaccttatcattgacccactcgccataggtaataccgtgctcttttttagctttttcaagattttcttttgattggtaacgtgctttagttttgtctgttaagcgccacgcttcatgatttttatcaaaaccagcatcaatcactgcaacaacggtcccaactcccttgcctgctttttcctgcagggttttgacatgagaagggtcgttcaaatccctaatagtcgcttttgaggttgctggtgtatcagcagttttagcaggagcttgaggggctagatcattagcgtcatctgctactgtttctcctacatcactaggagtttgtgaggttttagtttcctttgatgatggtgattcctcagaaactgctattggttgtgggggttctacggcttgttcggtagcaggagtgtcttctgtcacagtatttgctttaatgtctgattgtgcattgagcaagatgctcgtagatataagcgcaatggcaagtttatcaaatggtagtttttgttttttacgcaatgtgtcgtcctttcatgatgagagactttgtctttatgaccattaagaaaagagagaatcaaacgattctctcctagctatccgtctgtgtgtagagaaataaggataacgtcttttttaaagagcaaacaggggttatttgcatatgacacagctatttttcttgcttttgccataatgattaaatgtatctcatttatcaattatattactaacatctttattataaaacaaagacgattattagtaaaggtcatctttttaagagttgtttagtttgtgacctccttaacctcattcttttagacataaaagagagaaccgatcggttctctcttgatgttcactcaggtatgtgtctgaaattttgagattagtcgatacctcataaatttaagaaaacttgaattattcttaaaaagaccaaaacaagtattttttgcttgttcagtcttgacggtattgttttagttatgctacaataaggttcgactgattaagcaagtggtatttgtcttaatcggtttggtgtaggagttcgcgctccttcaccttttttgcttttctttaatataattatactactttagaagatttaatgcaagttaaaacatgcaaaaaaacgctagaaataaaggtatctttagactttttctattttgttttgattcctgttatactccattttctgccattttttagaaggggcttagaaaatttatctaattcatctgtctttttaaaaagtcgccctgcactaaatgaaccttctttatactcactgtatacctttctccaagaaccgaaaaataattctcgtaaaccgttagctctttcaagtataatcatatttgccattgtggagattccccactttgaccaatacatgccacgtcgcttcattctatacgttatctttctgtgttgtgattccatgataccaataccacgatttgaaagatttctaagatgagctggttttatatatttgaaattatttaatacttttttcttaaacttctgaaattcttgatcttcaagttcatcacaaatcagtgattcaacagtatcaaaaactaattcaagcttatcagaattatatttttttaccgcatctaaagcaaaatcggttaattcaattggatattttctaaggtatgaacttaacttttctttaacatgatagatatcccaaaaatgctcatgtttctttaccttaagtgcttttcctaattccttaaaaactctactagtatagcctttacccatatcagagttagtgattaaaatagtatcgtcatctacttcatagttattataaatataatctaaaagattatatttagctttatcataattaagctgtaatatttcgtgcttgtcccgcaattcatatcttttagtagaaactttttttgagcctgtatgaataacaaaatgtgttaaatctaaataccttctttcctctctagaatctgtgcttttaatcatgactccatcaccctcaacatacagttttttcacttttttacgttcgggtggctcttccaaataaaaacgatagcgttctttttcttttaacaatttttctacaaattttactgcttttaaaacacagtcttttgttatgattgtttgcaaagtgctatctattactttgcaaacttgacgataaggcatcattgtagccaattttgcaacatgatataagaattctattgaatatctcttatatttttcaagacctaaccactcatctactggtattctagtttcaaagccatttgtccagcgactcctactaaatgttatttctccaaaagagaaaacaaccgtacgttcagactgattgatcctcttatagcctttcgttctcatttgaggagcgatatagctttcatactgttcaatttgacttaaaaattgtttctgttttattttatttatttcatttacaaaatctttttccgagaattttttaacttccatgataatattttacaatttttgttacaggattagaatattattgctattttttattcgaaaagttaaagtaaaagaccacatttaataacgtgatctttctatttatcctactgtgcaggctcaaatccatctaatccaatgaatgactgaaacttgccagtacctgaatttgaagccgtgccacttaaactttgaacatcatattcatcttttggctcagaccattctgcatgaatataattagaatcatctgtgtcatcttttttccagtacaaatcagtattgtactgattgtcaacgtaattaacccaaattgtatcaggctttccaaaaatttcaataatatcttttaaagatttatcacctttttcaaaagtttgattgatgttttcaacagtaaaattattataattacctgatactgatgataaatcccccctaaaatcaacctttgaataatccatttcttttatataatcactcgggtttaatcctaacgtttttatataatcttctgctcgttcttcatcagtttttttgtgtttaacgacttttgcacttgtcgcaccactaggatttgtcttattctttttagaagtattactgctttcagaacctgtaaataaatttataacactactaacaataattatcactattattaaacttaaacatccaccacaaccactttttttctttacttttttcttaaccatttttcccatctaataatgatttccataataaatataattcaaactttgtttacaaatttttaaaaaagtcatttataaaagatgatgctgaacgatagcctttttcttttgatagcctatcaattttttttcggactgaaggttgaagtgtaaattgatattgttttgtacgttcaaagtccctaatattcatttcagatgagaaaatttctttcttttcttcatctaaactttcttttagaacttttgttagttccgaattttttggttcaaatgccatattcatcctctttcttataaacatagtcatatttatgtatataactatgtttatatttgtaattatatttatagtttatcagtaattttcctaaatgtaaaatcaatttctttgaagaatttactatctcttgaatataattctttatcagacatcatataagatagagactttttgtccaatgttgagcggttaaataactctttatgaggaatcattgcaagaactgatttatcattctttagtgatcttattaattcttttgaagagttggtattatgctttatcatattacctaaaaagaataattttgctgtgacataacttgctcgagttttaaagtcaaatgcctctgttttaaattcttcaagtctttcagaaagatggatgtatactataaaagtagacaaaactttgtgtgttacaatctgttttaaaagacacaaaaacgaaaggacaacctatgtcaacatttaaacgctatgatgaagaattcaaacaatctcttgttaacctttatcaaactggaaaaactcagtctgaactctgtaaagactatggggtatccacttctacgcttgcaaaatggatcaaacagtattcccaagtcaaactcgaagataattctgtacttactgccaagcaaatacaagagttacaaaaacgtaatgcgcagcttgaagaggagaaccttatcctaaaaaaagcaagtgccatattcatgcaaaacttaaagtaagactcctcgctgtctatcggttacgctttgaacacgccacaacaaccttgtgtcgtgttttacgtgtcaatcgctccacttactataaatttctaaaacataagccctcaaaaagagaattggataatcaaatttatagaaaacaaatacttgagatttataccaaagcgaacaaaagacttggtgtgaagtctatcaaggtcattcttcaaagagactatgacacaaaaatctctgaaggaagaatttgaataggttacactaaactagacagaaattataaagtgttctacacttaagaaaaactggagaaaaaccatgtctagaaaagtacgtcgtcacttcaccgatgattttaagcaacaaattgttgacctttacaatgttggtagaaagcgtagcagtctcatcaaggtatatgagctaaccccttccaccttcgataagtgggttagacaagccaaaacaactggttcattcaagtctattgataatctgacagatgaacagcgggagctaattgaactcagaaaacacaataaagaactcgaaatgcaattagatatcctaaagcaagcagtggtgattatggcacaaaaagggaaataatcactgctaataaggataaatacagcatttcaaagatgtgtcgctggctgaatatgccacactcaagttattactatcaagccgtggagtcagtatctgaaacggagtttgaagaaactattaaaagaattttcctcgatagcgagtccagatacggatccagaaaaatcaaaatatgcttgaataacgaaggtatcacactttcacgtcgtcggattcgacgcattatgaagcgactcaatttggtttctgtttatcagaaagccaccttcaaaccacattctagaggcaagaatgaagcccctattcccaaccacttagacaggcaatttaagcaagaaagaccactacaggccttagtcactgacttaacctatgttcgtgtaggcaatcgttgggcttatgtttgcctcatcattgacctatacaaccgtgaaatcatcggcctgtctcttggttggcacaagaccgctgaactcgttaagcaagccatacaaagcatcccttacgccctgaccaaagtcaagatgttccattcagatcgtagcaaagagtttgataatcagttaattgatgaaatattggaagcctttggaatcacacgttcgcttagtcaggctggttgtccttatgacaatgccgtagctgaaagtacgtatcgtgctttcaaaattgaatttgtttatcaagaaacctttcaattgctggaagaactagctcttaagactaaagactatgttcattggtggaattaccaccgcattcatggtagtctcaactaccaaacaccaatgactaaaagattaattgcctagaaaaacactttataaatgttgtacagaaaagtgttgccttttcaatctttttaaataaattttctataacaaataatctaataatgaattataatatatttagattatttaggagacttaagaaatggtaaaccaattaataattttaggaaatggatttgatagagcttcggatttgatagagcttcggatttaaagtcaggatatatggattttttcaattttagatttaaagattcagacagtactagtagtttttggtattatattttgagatcatgttataataaaaaattgtctagcgatttatggagtgatattgagaaattaatttcagtacatctaaaaaacattataacactatataataacgaaacaattttaagtggcaaagatattgagagtatatatatcgaaacattaagcactgattactcaagaaatgattactctaccagtgaggagctaacgcaaaaagcactccataattttttgtggaatcataatggtatacctattgttccagaactagataatttattattactaattcaaaaagatttaaaaatagtcgaagatgagttttgttcttatttaactaatcaaatagagatccaggaacaatcaaaagatgattattttaaagatataactaatttgggaaataattacttattaaaatctcgaattatttttgaactcttgtataaaagtaatatttctagtgcattcacatgtaattcttttgttgcactacatgattttcataacgaaaattgtttcaattcctatgaaggatttcttagctacatttatgacttagaaagtaataatgaatttaatgttgaaacatcaatattgaattttaattatacattacctagaatagataaattacaacgtaatattcatggaaccctgaatgataaaaatattatttttggaatagattatgattctttaattgatatacaaaaagataaaaatgttaccctgcctgttgaatttaccaaatcatacaggatattacagaacggaaatatatttcaatatccaattccctctgaactaacttttataaaattttatggtcatggtctgggtgaagcagactattcttattttcaatcaatttttgactcaattaatctttattccagtgacactgtactaattttctattggagttgttataacgagaatattagggaacaaattaaatctcaacaagttcatgcagtacataaattaattgaaaaatatggagatacttttaataataagaatcatggcagaaatttattcacaaaacttcaattagaaaatcgtttaattattcaagaaatactttataatgatattctaaatccatattaaacaaaacacccccacaaaatattgtgggggtgtttgtggggaagattcaattgaatctttccttttttaatcgccttaactttaacgaaaagactttaaaactaggctttcacctttaaacaaccaatagatgattatttaagagtaacaattgcacaacctgttaaatgtgcaatatcaaggggtttgagttcttaatttgaagtttggcaggaattttggcataaaattgaatccaatcctgcacttttgatattttgtgtgatttcttcagaaactgttttatctaaagcattaaaccagtgactgtaagtattcaaagttgttgatttatcggcatgtcccatacgtctggctacatataaaatatcttttttcaagacattgattagataggatgcatggctatgtctgagaccttttcctgtaattactggaactcctacctgttgagctttccgtttgatgatgcgacaaatggttgatttgcaaaaaggatctccaaatcttgaaatgataaaatctgtatcttgatttgcaaactgattttttcgccaaacttgaagtacttcaatagtaatatcatccaattcaataagtcgttcacctgctggagtctttgtttggtctttacgataccaattaccattttcatctttctctaaggttgtatgtacctttagaaattttttatcaaaatcaatatcctcccaacataaagataaaccttcgctcactcgtacacctgtcatataatataaccagatggcagtaaatcgttgcaattcttcataatcatgtaagtcaaatgatttgataaatgtctgaaactccgcataggtccaaaatggagtttctggatgtttacctctaggattatctaatgctttacaaggcatatttgaaatatagccaagtctttctgcataacccatacaagctttaaaccttgaccataaatttttcgcatagttttcagaataattctctatgatatgcaatctaaaagcttcgcaatctctaggagttattgcttttaatggctttaaaccaaaatattgaataaaaagtttatgatgaggaagagccgtcttatatgtcacagactgaaccttttgcttatatgctcttaaataaattttgttcatatagttttcaaaagtcatattgtaattttctaaactgactttgttggcaaattcatattttatacgaactaattcgtcatatgcttctttcattgtttcaaaggttttaccatattgattttttctagctttcttttgtacccttttgccagttactgggtcgattccaagatcaatctgataaaatatctttcccttattatcacaataaacacctttgtattttttactactttttgttgccatttggattctcactttctaaatgttatttagatagtggaatccctattaattgttccacaatttctgctggtgcgatacctagtcttcgattgtcaaagggcgatttacttaattgtaccgcattatggtcaactttgcgagcttcttcaaacttttttacagcaatttttttagcttcacgaataatgtctctagaggtatgttcaggaaatcctaagttcattaaatctttatatgtagcagttctcatacactttcctccttcaaatcactaagttattttacacgctagatgggatttgaatggttagttcaatcatgggaatttcacccgctgtcctttttcgatggcagcctgaacggtcagaagtatcattatcattatttgtgttatggcagataggtcaccatcctatttttgaataaatgattttcgctcatttcctggcgcattacattctattgctcaacaaataaataaagtcccacctagaattattcaattgtcaatgaacaaatcaggagggactattttaaattattctttattcggtggggaaagtcagtttgccccaacaaataatctgtactaacgttatatagatttgaaagttttattattacatctgccgataaaatacgttctcctctctcaatttttgaataagcagagtgggtaaacgaaagcttttcggcaacgtatttttgagtgaaatcattgtcttctctcaaatcccttaaacgtcggtacatcaatctttctcctaaggaaaagtatagaggataactaggagaaatttgatatattgtcctaattggacaatagaaataaaactcccaaaccgtttatttctttacaaattagacggtttgagagtagctttattatacattatacaaaaataaacaagaatatgttggaaatttgaacatttattcaatatgaatggaaaaatcgtctgtcttgtatttatccatatttaaaactcttacatattcatccaactttctaaccgcattttcgtattcttcgattttattgtctagctgattctgtatcatttcaatctcagattcaatctgtccaattgttacattctgcgataaattcatcttggaacattcatacttagctaattgcttggtatcttgattatcactttgtaggttaacaactacttctgccatcttgtttaaggtggtgtttttgtcttgaagatttgtcaattcaatatctagctgtgcgatgtctccaaccaattcatcttttaattctagaaaggatttattttgaatgtttaatgtcatcaataaattgatttcttcaattttttgttgaagactgaccagacttattcgtctcttataaggtaaagacttattgtcaaacgttagttggcgaatcaagtcccttcctttcataaatcgattcatttctgagtcctctttatgataaatgaaataagaagatgtttctcgaataaacacctgatactgcttcttattttcttgttctaagatattaagttgatgatttggaatgaagattagtccttcttgtccaatacccatccaaactttaacaaatagaccatctagcacaattttttcaatttgctcctccgtgatctcaacttcaaactcatgtacagcatctctcttagttttatacgtttcataagcttcggttatttcttctacagtcaatatttctgaaagctgttgtgtctcaaacttttcaaattctatttttacttcattattatgaagcacttcaaacacatcatgttccttgaaataactatcaaaatacgtagtatcataaagatttttctttcttaatgacttatttggtatggaaatgcagctttttccatcagaaagaacaaaatctatcgtttttttcttgctcttcaattctaatcccagtaaccgagctttctcaactaaatcatcaaatgagttggatcttagcaataaaaattctaaaatcagttcaatctttttcttggcaaagtaacgttgaaaatattcttttgaatagggttctctcttattcagcttatctccttggatgacttgcttcatatttctatctgtcataaaaaatcggctatgtttccttgagaaatctattttgacatttagttgctcagctttttgcataaaatcattgaaatcaattgaatgttccatgagaaaaaataaccgctgcttcaattcgtatttgtgattagaacgtcgatagacctcataatctctatgagaataacgtttaggtggaatgattttagcacccgctactttagaaattctatccgaaatcatttgtaaatttctttcaagagcgtagtcccacttcaactttttttgagattggctattgattgagttgataataatgtgattatgacaatggtcctgatcaacatgagtggcaacaatgaatttatattgaccacctatcaactcttttatcgtttcatagccaatacgattgatttcctctgggcttaatttatcttcaggtgagaaagactgaataatatgatgagcatgtattttctgttgctttttctcttgtctatcaaaccgtgagtcgtagagttggtcatttgaaagaaaattattttgatacatcttcaccagttccacatagtcaggaaaatcaagataattactcatcccaaaatctgaaatcaatgataaattcctggttttcttaggatcaagaatatacttaatcaattgacggcggtattttttcccatgaacagcataatgcttagtgatgaccataaaattctctcaatcgctgacactttatgtcaaaatcttgttgtaactgtgtttctaactctgctataccgagctgcaattctttgacttgttgaagactaagtaggtggctttgatttaccgaacgtgcaatctggtttatattatttccaatcctacgaatttcaaaaatcaggtcttgaaaacctcttgtatcgattgtgataaaattcatacgaggattgagtaaggtttttctggcataatgcgaaaagtttggacactgactctgagcaagatttttattgaggataattaattcttgatcactcaaatacacctttttcaaattggttcgataacgattttccataataacttaccccatgtacttgtctttgaatgaatagcttaatggaatagttacctcaatttccttcatcaagtctttgatacaagtcaggatgatttcaagatgttccatagtaactgattgagacaactttgccagaacaagtatttcatgtacatcccggtaaatctgttctactttttggtgctgtaaatattttatccattcttcaagctgctgagatggttggtggtctattttcaataatttacctctagcaaaaggggaaaattgttcatatccctcctgttccataaaattttgtatctgttgatactcttctattgagaaattgacttccttacgtatctctctaactagatttcccatcctgtatcctcctcattctttaatatcggtatatccccgccctcgtattagacacggcactgcataatatcttcctttcaggtctttgcgagctcagatattgtgtccacaatatcccaaaaatcatatcgccagctgaccaaaaccttccagttttgacagccaacgataagataacttgatggctccgcccccaaacccccagtgaaaaatcaaggattgattttcttaggaatggtattaggataacagggatgatttggaaaaggtatcacaaaattgatataatacttttataggaatattttcaaagaggtgcattatgtccaaatcatctaaacaaattgaagaagatgctgtcgattatttaaaaatggcgttaaaaaaatcgggtattcggattttatggtggaaaagggcttataaatcacccttctccaaattcttaataagtgtggaaaaatcgacacctaagttgtctgtaatgtcgtgatcattcacttcataccaattgaaagtatcgtataacatagctttattgaaagcacttgaattaaatcgtggcttacgctttttatggagcttctcattgaaaaggattttggctcgtaaggcatcaaacgagtaacctctacccattcgctctacctgcctaataatgctgttaattgactccgtataagcattagtgagccttttatcaaagtagttgaatatttcaacatgccagttgtctacggctctcacgaggtctttatatgcgtctttagagttgctggacatacaacggtgtctccattgactataacgaagatgaccttcatctggatcaggagtatcccatatccagtaaaactcttctttgagttcataggcttcttttaaagcaggaagattacctaaccaagtatctaagaggaatgattcacgttcatttagatcgtgtttacgctttagaaggataaacctttcacgcataagggtacgtctttctttttggctcatatgggctttcaaagactttctgacgttatctaaggcttgattagccattctaactacatgaaacttatctacgacaactttagcttgtggaaggatagtgttcactgcgtctttgtagggcttccacatatccattgtgacgtactcaatgtaagtcctgtcactgatttctgaaagacgttggatgactgtttccttgttacggttaggcttgatgtcataaatagtcctgcgttcaatattagtcaatacaagccgaggtctacggataatatgtatctcgtctatcccaagccacttaggagtttcaaactggtattcacgttctttgagtgccacatagtccttaaaaacgttcctaatggttttctcgtcaacaccaacgctttctgcgacttctacaaaggtcttagacatggattgctcttgaatggactttaaaagccttttggtcatactacgcttttcatctacagatatggtagatccgcattcacgacacttgtatcgtctacggttcaaatgtaagcccactcgctttaaacgaatgggcaaatccataattagttgatttcttgaactgtgtttgtacaacttgtcaaaaccacattcaggacaacgttcaggtggtccgactgcttcaactttaaacatcatatcggtttcattttcttgtggcggttctattgttttaatgtctggtagggataataagtctgacatattattcatcctttattactctgcggtgttaaggtatcaattatagatttgatgtcgaaatcatcagtgttaaattatttttgtgaccacaaatgcacttagaaaatcccttaaagcattagctggttcacttgaatagggagttgtaaaaaagttcccttagcctgcacaacaagataatttcgaaatatctttatcgaacgtaagtgcaactaattttagcccttcagccattgttaaatatggtgctagggtttctgttaaatcttctatcgttaagccaaatttaacagctaatgatgctgcatagatgacatctcctgcattttcagatacaatatgaacccctaatacttttagtgtttctgcatctgctactagtttaaatacaccggttgtttcacggtttacaattgctcttggaacagcatctaaaggtaatacagatgtcttcacatcataccctttctcttttgcttgttcttctgttaaaccaaccgttgcaaccgtcggattcgtaaacgtaacagcaggaactaccgataaatctatttttttgtttaatccaccaatagcattatcagtaataattccaccttcataggctgctacatatacaaattgtggtcctaaagtcacatctcctgctgcataaatcttttcattacttgtttgaccaaaatcattgatcaggatttcattattttttccagtttcaacacctgctgcacttaaatttaaagaatccgtatttggttttcttccagtggcaacaagtaactgatctgattcaatgacttctctactgccatttactgttacgtaaaccctttttatctctccactttgttcaacacgctcaaaagttgcccctttgacaaggtttataccctgttcaattaacgctttttcaactgactctgaaatctcaggatcatactcctttaaaagtcgctcacttctttgcataagcgttatttctgaacctaaatgatgaaatagttgtccaagctccattccaatgtatcctgaaccaattacagttaatcgttttggtattttctttaactcaagaagtgttgtactagttaaatagtccattttttcaagtcctgaaatttggggcaacgaaggcgatgcacctgttgcaattaaaaagcgttttgcagataactttgtcccattgacctcaaccgtactagcatcaacgaattttgcttcacctttaattaaatcaaaattatattcatcaattaaatccatatatttttgattccgaagttcgctcaccaatttatccttttgcgtgattaaactagctaaatccacttctccagcggatgtttgtaaacctataaacggattgtcttttgataaatgattgatttcccctgccctaagaagagtttttgacggaacacagccaatattcacacaggttcccccaaccgttccacgctcaatcattccaacttttgcaccgtattctatagctttaattgccgaagaaaaggcagcagcaccagaaccaataataagaaggtcataattgtcttcattaattaacgccacgttttctagtgatgatacttcttcaatttctccggcttggtaatttgcttcatcaatcgcctttattgcactttcaacctcaatatcatcgggcagttcaaatactgcttcaccacgacgataactagactcaatatttttagcacctatcttttcaagtgctgattctacgtgtttttcacaacccgtacaagtcattcctgaaatgtttaccttaaatttattcataaaaaagctcctttcgttaattaatctctcatgttaatgtttctattattggacacgaatgtaatttcttttcatctggacatcgttgttttaagtcgtctaacatagtttcaattcgttttaaatcctctatttgtttttgcacttccttttgttttttagaaacaaattcgaacatatcttgacaacgaacttcatctttatctacaacaccaagtaatttataaatctcgcttaaagagaaaccaaattcctgtattcgtttaataaacccaacacgcttaacgtcatcatatgaatatatccgataaccagcttccgttcggtgaggttcttgtaataaattttttcgctcgtaatatctgatcgtttctttattaactccacatttatctgcaaactcactaatgcgataaatcatcttatttcaccccctgaatattataaaccatgtaccatagtacacggtcaagtaaattggactattttatttttttcccaaagtatcactcgtatgtgattgatacttttatataatactattgattatcctaacatcccaccagaaaatccgatttaaacaccagttgtttttaaactattaagaaagtaattccactatatattccgaagacccaaaaaatcaaaacatattaacagagaaatttctgagggagataaataaccaatctgggatggtcacatatacttttacaaaaatatagaaagacgaaatattgattttttggagcgaattcctgttcagtttaaaggttgtgatgattattataacgaaaatgttggataccctctaagcaggattaatttggagcattatctaactgaaggtggtgtgctctactttgtagtgtactcgaaagacgttagtcctactgtcacttatgcttcactaacaccaaaagtcattaagaacgtattgccagctagtgacaagaaaaaaagaattaagaaaaaagaagatatctttctcctgttctggatggctataatagcgaaattattgattttaccttatcccgctctccaaacctcatacaagtcaagaccatgcttgagaaggtcttccctgaggaaacttacccaaataccattctccatagtgaccaaggttggcaataccaacatgaagtctatcaccgctttcttgcaagtaaaggcatacatccttccatgtctcgcaaagggaccagcacggataatggtatgatggaatccttctttggtgtcttgaagaaagagatgttttatggctttgagaagactttcaagtctctggatcaactggagcaagctatcaccgagtatattttttactacaacaataaatgcattaaagaaaaactaaaaggacttagtcctgttcagtatagaattaaatcctttcaataatattttttgtctaactttttggggtcagtacaatgactcataaatatttttttgcaagttcaaatactccatgagattaataactttattattttagccaactttactaatcgtataaacattctccaaatttctcaacatcaattgagaaatttggctttttccgttgctcagttaaagcgtcctttagttgtatatttcctgttaatatcccttttgaagcataacattgttttcaatgatcgcatccgattgttgacacccattttagaacctattctttgattttcaataagcgtaaactgtttaatgttacaagtaaagttgctcccatatcagcaaatatcgctatccaaagtgttaaccaaccgggcatgaccaaaagtaatgccactaatttaatcgccaaagagaaggtaatgttttgcttgatgattgctaaagccttacggcttaattttattgtatatggcaatttactcaaatcatcagacattaaggcgatgtcagccgtttctaaagctgtatcagttccagcaccacccattgctacaccaacggtagatgccgcaagggctggagcatcattcacgccatctccgaccatccccacactttgatgtttttctcgaagttctttaataaaattaagcttatcttctggaagtaagtcagctttaatatccgaaacaccaacttgttttccgatggctgttgccgttctttggttatcgcctgttagcatcactgtttcgattcccatattgttcaacttgccgataacttctttagacgattccctcatttcatcggctacggcaataaacgaaagaatttctttttctgttcctaacaccatcaccgttttaccttgagtttgcatatcggcaattttttcttttttatcgcttgaaatgcttccgtgtaattcctcaaaaagattttgacttcccacataatacatttcattatttattttggctttaacgcctttacctgtaatggattgaaaatcctctactgttacttcattgaattttaatccattttcttctgcttttcgcataatcgctgaagcaagagggtgctgcgatcctttttcaatggctgatgttatggttattaattcattttcatttctaccatatgtcacaatgtctgttacagctggaatccctttggttaatgttcctgttttatcaaatgctatcgcttttaagtgtcctgctgcttctaaatggataccacctttaattaatacaccatttttcgctgcatttcctattgctgtaaccacagcaactggagttgagactactaaggcacaaggacaaccaaccactaatacagctaatccttgataaatccattggctccagtctccgccaaataatggtggaactactgcaattaaaagagctagtatgacaatagctggtgtatagtattttgcaaatttatcgacaaacgcttgagagggggcccgttctgcttgggcttcttctaccaagtgaatgatttttgaaagagtagtatcttcaactcgttttgttactttaacctcaagtaacccttcttcattcaaggttcctgcaaatacttcatcatttgtgattttcgttactggaacactttcacctgtaatcgcagcctgatttaatgtcgatgtacctttaaccactattccatccattgctaacttttgaccgggcttaactatcatgatgtctccaacttgaatctcatcaacatgaatcatcatttcttcattgcctcgtcgaattaacgcttcttttggggcaatatccattaaagattcaatagattgacgtgctttatccattgaataacgctctaatgcttcactaatcgcaaataggataacaacggttgccccttcaccccattcaccaataattgcagctcctataatggcaatagtcataagcgtattcatatcgaaatttaatcttcttaaatttttgagacctttaataaataacgaatatccaccgattaaaatggacgctgcataaccaattgtcggtagaacatgctcttcaccatactgctctcctaagaaccagctaactacaagtaaaagagctgatatatataccttaatgttttctttctgcttccaaaaaggttctcctcctaccctttgttctttttcatctcgaatttttaaattttcaaatgctcctgctttttctaattcttcaatggttgtcgtccctttaacataaactttagatgctccgaaatttactttcgcatcctgaacaccgggaagttctttaacattattttcaaaaatggctgcacagttagtacaagtaaatccttgaacacgataggctttcatttctttttcagactgttttgctttccctctagacattgatcttcacctctttcttatgtgccaatgcaatcatcataatttgtctgatatgctcatcatctaaggaataaaatgcaagttttccctcttttcgaaacttaacaatcccttgcttatggagcgttcgcaggtgatgagaggtatttgcaaccgtaacacctataatatttgcaatatcacacacacacagttcgtcatcttgacacaatgcataggtaatttttgctctatttttatctgcaatagcttttaacatttgggcaacactagaaatatctactgtctgtaaattaccttgtattcgattgaccttttcttcgtcataacaataaatttcacaagtattttttttaatcatattctcacctcaatatcattcaagtatttgtttgaatatagtataacccttttcattaattaattcaagtgtttttttgaatgaataaaaaaattcataaaaaaagacttggagtacccaattctaataacaaaataaccaaactgcataagactttaagtacataacattattagtattgaacttgttgaggaggtgctttatgaatcagcttgagtttcagcgtaatcacctgcaaatggactattacagcgagagctaccaagattttgaacgtgacttctaccgctactccaacatgaatattccattgatcttcctgaccgatgatatcctcaaaacaatggcgacttcacgtaagaattactttgtcctgaataaggaaaagtccaaagataaccgcgatcacttcttcatatttgaagtaagaaccttagaagagaatccactaatctatcattatacatataagaaaacaactacatacttaacacaaaaataggaactgttcaattgactgttcctatttttaatcttcataaaatctaagctattctattttgaaaaatttaccatcttcgaatatttttccaaaggaccagatggtttaaaactaggtccctgccgaccaattattaattttccttcccagatttcctcagggatattactatctgttagcttaaacaaactttttgagtttccaagtcgtttaaaatatgctccagaataaattggctcctgattactgtcatttgtgataaaagggtctttattcgaaatgtaaaaatcaaactcgttacgatctctcccaaaataaaagattggtatctcaagcatattatcaatttttctattatgaatatactcacatagatttaagtagccactttctacagttttaatcaaaccgagatctagtttatcttgctccgatattctataccctcctagtactagataaaaaattaacaatgcatggtttctagtttcttcaattgttgtccaatcatttaaattatgcttatgaaaatagccatttcttaatcctacaaaagttgacaatgactcaacaatataataatacgtttcgtcatcaataccatcagcaagtaaatccatattacgtggatagaatttctgactgttaaaatctccaaaaaaacttgtaatagatttaagatttatatttttaacttttgaactatcattaaggagtttgtcagagagtgtatctaacggtttagctcctgcaaatattttacggtttacagaatccttttctatggtatgtaaagagatataggaaaatagaaattgttcaatagatttaaaataccccatggctattgatgttaaatcaatattttctgcattttgaagagagtaaaatagttactcccttatatgctttcgacattgattatctgaatattcctaaatatgtcggtctatcaaaggagcagattctggaaaactaccgcatcctcctgacctatttgaatatcccatggtttctcgcattggatatgccggatttccctagttcggctagtgggcttttccactttttcgaggtcaagaagctttttatgctggactacctgatcttgatcttttctggaatgggcacgctatggtttgtacgacatctaaataggagacgagaatcttggcggctcctaccctacttccgccagggaacccttattccccttgctatccttttggctctcctggttagcttcgacacgctgtttgtgcttttccataaagttttctttaacaatgacgcctggctcttcaatgccactactgatcctattatcttagctttacctgccgagttctttatgcacagtttcctcttggcctttggattaatcgaagtcttcctaatcctggggtacttcactactaaatatcgaatctctgccccaagccgttgattaaaaaggttatggttcataagaaaaacagggctctccatcgaaagcatgggagccctgtttttatcgaaaatttatcgatctatgattttccttatacagcatactagctggtctgacccgattctggaagggggtcaaaccagccagtgttttttcgttcctgcttcgttttatttcggctctaatttcaatgtcatagcattgatggcaacaataacggtcgataaggacatgaggacggcgccgaaggccggacccaaggtaatgccgataggagcaaggaggccagcagcaattggaatcgcgataaaattgtagcctgctccccataccaagttttgtttcattttacgtgtcgtcttgtttgctaactcgataaaggattcaatatcccctggatcagactgagtaaggataatatccgcagaatccaaagctacttgcgttccagctccgattgcaatacctacgtctgccaaggcaagggaaggtgcgtcattgaccccgtctcctaccatgataaccgtcttgttttggtttttcatggactcgaccagcttgtacttatcttccggagattgattggcttggtattgaatacctagaacttctgcaactccttgtgcagcttcctcgttatcaccagtagccatgagtggttcaattccgtattttttcagcacctcgatcaagtttctgctggtttctttcagttcatctcccaatgcgacagcgccgattgcttcattattttctacaaggatacttaaagtagcgcctttcggaatatccatacgcaatgcttttccgtatgccttttggctgattaattgatagtggtggccgttcgcctccccttctattcctgctcccgaaacgatttcaatggagtcaaaggaaactgacttaatgcctttcgcttcagcgtggttcacaatcgattgggcaatcgggtgactggagcccgcctctatacccgccaacaagcctgtaatttcttcttcagaatatttatcactcaaaacagtgacgtccaacactttaaattcaccagttgttaaagtacctgttttatccaataccataacatccgctttagtagttaattccaaagcttctctatttttaaccagtaatcctcggcttgcacccaaactagtactacgtgatactaccaagggaatagcaagacccaaagcatgtgggcaggcaataactaacgcagtcacagtaaagataacggctgtaggcagatccgcaatgatcgtccagattagtagggcgattaaagctactacaaccgcaatgtagaacaaccagctagctactttttgagccacattctctgctcgagaaggttggctttgcgcttggctgattaatgtctgaacctgagaaatgaaggactgatcgcccgtctgctttatttccacatagaggactccgccaccattggttgatccaccgatgacctcatctccggtttttttttcaattggtttcgattccccagtcacaagcgcttcgtttacacgagattctccgcggataatgataccatcagctggaacattttctcctgcttgaacacggataacatctccaatctgaagttcagacacagggcgagtctcaatcgaatcgtcttctaaaacaacatgagcatctttcggcaccaactcagccaatgctttttgcgcgtcccctgcttcacccaatgccttcatttcaatccagtgtcctaataacatgattaaaattaaggttgtaaactcaaagaagaagtccatgacatgctctccggtcacataacgagcggccactgcgtaaacactataggcataagaaaccgttattcccaaagtaatcaaggacatcatgcctggagcttttgaattaaactcatctttcgcacccatgtagaatggttttccgccaaaaatgtatagaattgttgccaatacagctgctacaacgtctgcataaggaaagataatttggaaaggcaactgaatatccatcataggcgtaatgagtaagattgcaattcctaatgggagtgacttcaagaaaatctccttaaagctaccgtgatggtggtgggcatgccctcccattgcgccatgatccatttcactgtgatccatattgctgtgatccatctgactatgttccatttcattatggtcgtgttttgagtgatcaatgtcgccgtgattatgatgactatgtgacgaatgttttttgttatttctcatttttaattcctccttattatattagagactgattttaaagttttagaactttctcatctaacactacatataattctcacgaaaagggttctatactttatctctagctactatctatgaataaatgttattcgtactttatgcacttaatactgaatagttagtttctgctaaagcagcattgagcgtttcggtatcaatctctgtttgactttcaagtactgcttttttagtcgctaaatcaacctctacagattcaaccccttcaatagctgaaaatctttcttgtaccgtgttcgcacaacctgcacattttacgccatctaataagatttcttgtttcattattttattcccctttttttatcttctcctattatatagaataggtagaagtttaaatcccagataagctacgtgttttctaaaaaactgctggtttgaatcgtcttaaccgtaaagcattgagcaagaccgatacggagctgaaactcacggcgactgccccgccaacattggactcatcaatagtccgccaaaaatatacaaaagacccatcgcaactggaatacctacaaggttgtaagcaaaagcccagaacaagttttgtttaatgtttcgtagcgttgcatgacttaaatcaatcgtagtcaatacagcggttaaatcattacgcataaggacaatatcagccgattcaatcgccacgtctgtacctgatccaactgcaattccgacatttgcttgagctaatgcgggtgcatcgttaatgccgtctccaaccatcgctaccttcttgcctgcctcttgtagttttttgacttcctctgctttatcttcaggtaatacttcacttaatacactgtctatacccacttgcttagcaatcgctttggctgttcgtttgttatctccagtaatcatgattacttcaacaccgcgtcttctaagtgctttaacagccttcatggcaatcgcattgcccttctgtacactgacaatccacttcttctactgcgaaagatttttttatctctaatattttctctagtcgatctatatcatcgaagcttaagacatgatcttcaatgatgcttcctattacatttccgactttctttttgcaaatacggttaaaaatatcttctgcaaaatcccttacggcttctttctctacaatattggcagtgtaaataaactttctaccttcttgctctgtatttagtacgcctttttcaactaatcgacctaagatcgttttgatagtggattctgtccagtccattttttctttcaatacagagatgactgttttactagttactaaatcatttgcccaaactacacgcattacttcccattcagcatctgtgatagaagtattaagttctattgtgctcattttcctttcctcctcgttgtttacagatgtaaacgaatatgttcaagataagtttaccattgtaaacgaaatatgtcaaatcttttttataaatgtaaacttggaatttttttcaaaaaaagttaagttgtattgtatcaatttcagaactcacacttcggttttagtactcattttaatacaaattttctaagcaagaaaaaaagtcactcaataggtgactatagaacgtagacaaactctatttttagaaggtgtaaattaaaattatttaattaccattatttcaactaactcttgaaacgctcattttatcgtgtatcaggagtttttcttctctagaagaacaaaaaagattgaagaaaaattgtcccaaatggactttttcttcaatctgaaagccccatttaaggggcttttttatctataaaataaagttcagaaaagtctcaatcgtgccactttcatacatgatgtatagtccaagtggaatgaatactaacggcacaatgattcgctggtatttttcaattgtctcggatattaacggaatagaagatagcacccaactaagctcgcaaaagataattatgccgattgcaaacacaagcaacaccacgagggtctgtgaccaatctaacgaagcaaaataaggtatatagatacctaaattatctccgccagatgcaattgtcagcaatgttactgtccaaaacagttgatttgccttgctttgttctaatctttcaataatttcttcctcttcttcttcctcaccttctccaacaattgcaaagcgaatccctaaatagatagggattaaaccaagcaatccaaccatccatgcttcaggcacgaaattgacgacataagcagcaactaaactcgcccctacaagtaagccagtgcctagatactgccccgcataaatatgccatttctgtttattctgtgatagctgtgcaaataaaataattaaaacaattaaataatcgatactggtggaaatataaacaccaatagcagatatgattgtctgtcccataaaaaaaactcctgtattagtcagtaataaatcagcaaattttaagagaacacagacacattaatttagctatccctaatgggtaatgtcgaacgtaggaaagcattttactcctcctcaaaacatagttacaaagtaatttctaactggaattcggtgaccacttccatgtaaagtataacccattatactttacttcgtaaatgtgggctcgctgaggggtcttgcagacagctatttcggctcttttgagccgagtatcagcgcacccttacctcattcaaatatatttttgaatgtattctaacattaaactttgtagatgtcaacttcagctccgccaaaatatagataagaagttagtgtaccaaatataaaaaagccctgccatccaaatgataacagggcttaacttcaatatccaaaggacatattcatctaaaaaaggtagatttcttattgatttatattgcaatgtaatgaacttcaaaaattcaaaaatcgcttaaaatcaatgttttgacgtctaatgacgcgtagtgaaccacttacttaacctcagtaaagaaaatatagctaaaatagattttgactttcttaatgaggcacttaatgcaaatattcgtttgaaagaattagtagatgaactaaaaatttcaaaagaactggacagtaaaggttggtccaaaaaagactctcgaacgataaaaatcttgtacgatggccttatcaataaacatatagtttccctagatcgtgcagattataacattatccaagtcattccatttgctaatgtacatgtactactgtttttaataccagaaagggagaattctaaaaattatagaatatacaactacagtgattatgaaatggagttaatcaatgaggataggcaacaattttcaaaatatgaaacagttgatttagaccaattgatacttgttgatatttttaatattgatgactacatttcatcatatttaacaatataggatatagagaatctggatcttggtcttttaaagttgataaactatgctgataataaaagcgatagacatattttacaaacctgtttagaatttgctcaaaaaattgtagaatcagataaatctgaatatagtattctcattttactacaaataaaaaaacgattaaacatattaacacaaatggatagcaactatcttcattctctaatgaatcaaagttcggtagaaattaggtttgctgcagcctgtattctaggtaacaaagaacaagccagatattttttcgataaagaattcgctgatgaacaaaaagaacgatttctggaatatccgatttattacctccttagcctagactaataagttttaactataatgttaagttagagaaaacattttacaattgttttctctaatttttcttttttagtttaagattaataaataatatttttagcacaaaatttttactacttgcatcttaaatcttttatgatataattttgttagtttataaaacaacaatagttttcaggaggtaatatgttttctggtaaacgattaaagaaaagacgaataacacttggctattctcaatctgaactagcagataaacttcatataaaccgctcttcttatttcaattgggaaaatgaaaagactaaaccaaaccaaagcaatctcaaacaactagctatcctattagatgttcctgaaacatatttcgagtcagaatataaaatagtcaatacttatcttcagctttctttacagaatcaggaaaaggtagagaaatatgctgaggaattacttcaaactcaaaaggttcatgaaaagattgttccactgtttgctgtggaagttctatcagaaattcaactatctgctggtccaggtgaaggtctgtacgatgaatttgaaactgagactgtctattcagaagatgaatacacaggattcgatatagcaacatggatttctggtaattctatggaacctgtttataaagacggtgaagtcgctttaattagatcgactggttttgatcacgatggagctgtctatgccttgaattggaatggatcgctctatatcaagaaactctatcgtgaagaagatggattccgaatggtgtcaattaacccagatgttgctgaaaggtttatcccatttgaagatgaaatcagaattgttggtaaaattgtaggccacttcatgcctgtgattggaggttagtaatgtcaagacagtttgacgacattatatttattaaagcaaatagaattattttattactcgaccaaaaagaatatgatgtaactaaccatttaactgaattggttgatgaattagcaaaattgaaatctaggtgaatactatgggctatgtcgactactcaaaagaacctcgtagcgatattgcttttgtcgatatgaaatccttctatgcatctatcgaatgtgtagagagaggacttcacccgcttcatacttcactttgtgtgatgagtagggcagataattcagctggtctaattctagcttcttctccaatgttcaaaaaagtctttggtaaaggaaatgttggcagagcctacgacctcccctttgatgttcataccagaaaatttaactactaccgtgctaaaatttcaggattgccaacggatgcaaaatttgtttccttcatagaaaattgggccaagcgtacatttattgtgccaccgagaatggacttgtacattcaaaaaaatcttgaaatacaaaaagtatttcaaaattatgcagatccgacagatattctgccctattctattgatgaaggatttattgacttaacttcatcgctaaattattttgttgaagacaaatctctgagtcgcaaagataagttagatgtggtttcagcaaaaattcaacacgatatttgggaaaaaacgggtgtctattcaactgttggaatgagtaatgccaatccacttctagctaagttagcacttgataacgaagctaaaaccactgctaccatgcgtgccaattggtcttatgaagatgttgaaacgaaggtctggaatattcccaaaatgactgacttttggggaataggttcacgaacagaaaaacgactaaacaaattgggaatctacagcattaaagaattggccaactgtgaccctactatcttgaaaaaagaatttggtgttattggagtacaacattggtttcatgctaatggcatcgatgaaagtaatgtccatgaaccttatcgccctaaagcagtcgggattgggaattcgcaagtgctccataaagattacactcgtcaaagtgatatagagcttgtcctgcgtgagatggcagagcaagttgcgattcggctacgcagaagacataaaaaagcaactgtagtcgccataaatgtaggctattcaaatttcgaaaacaagaaatcaatcaatgttcagagaaaaattaacccaaataatcgtacgcttgtttttcaagatgaagttgtttctctctttcgttctaaatacgatggaggggcagttagaagcattgctgtaaggtacgatggattggtggatgaaaactttgctgtgatttctctttttgatgactttgaagaaagcgaaaaagaggaaaaattggagacaaccattgattccattcgtgatcgttttggatttcttgctgtacagaaagctagttctttattagaaaattcaagggcaatttctcgcagtagattagtcggcggacattccgctggaggattggagggtttaaaatgattgatagaagttatctcccatttaaggttgctagagaataccaagaccgaaagatggccaaatggatgggcttcttcttatcagaacatacggcaggacttgatagtgagcttaataaagttgactatacttctgagttatcaatttcagataaactactgctgctcaatcaattatacagtaatcagttgaatggtatcattgcagttcctggacaatattacagtggaaaagttgacaatctgacttttaaccatgtttcattgaagacaaaaacgggctttgtcagcattccaatcaaggatattctttcaattgatttggaggtggaatatgaatcagcttgagtttaataaaaatctattacaaatggattattttagtgatagctaccgaaaatttgaagaggatttctatcgctactcagccctagatactccacttacttttttaacagatgatattatgcttgccatggcaaaatctcaaaagccttattttaagctaaataaggaaaattcgaaagaccatcgtgaccattattttatgttcaatgtggaaccttcacgagataataatctagttaggctatattgttacgattcaacgaagacacatatttcaaaaaacaggccaaaataattggtctgttatttgttattattgctctctcgcctaccttgtctaaacctctcaatgtttttttccaattgttccgtgtgaagtttatttttcgcttcctggattgacctatcaagactttgatcctcgtcagttatatcgctttgagataattcaacgctcgtatcaggcttaaaatttgtatcaaaaaccacatctaggagttgttctactttggttagttcactatctgacatctctgatagtcgatgaatcagtcgtttgaattgatcctggttttgttttttcttttgaaaaaatttcattatattctccttcaattgtaaaaaggtagcccgcataggactacctgacttataaatcatcaatggctactgaaatagcctgcaactttttattttggattttcttttcatcaatcaattgatgaagttcttcaatttgcttctgacaggcggaaatatccttgttgttttgtgcaatggtatcagccaagtgttgtttatagtcacttgtgatatttaccttcttcggctgattttgtttaacggttgatgcgagcgtttgtacatcttttgattctgactccttttgttgctgttcaaaagcagccacataatctacttcttcaattggtttttcatcctgtttatgaaaaagtgctgcgattttagctcgttcttcatgggacgatgttggtttcacatcgtctagtggctgatcaaaattccatgttttactcattctgtatcctcatttctgtaatttgggtgtagtgtggtttctttaccaaaggcttgctctagtgcttcatgaaatgacaactgacttgattgttgtcgtttgataaaggtgctatacattgcagtttgtagttggtctcgatagtgttccaatttctcagtctcacgtgagaccttttcttcttgcctagctactttttcagccagacgttcaatcacactcatagggtgtcctccttgtcactttctagattatgatagcggacttgattttgttatcacaattccaaagcgtgctctcgtttaggtggaggatgattcttattgacttgtgcttgggctgactggataagatctcttaaagataattccttttgtcgtttcacaatatcattccaatctgactttgtttcaagtctttgcaatggtggtaaatcttgaaaaatcggaaatcctttatctgacagtttctgataaaattctcttcctgcttcatcgttatcaacagccatagttatgacgtttgaatgagtttgaaaaaaggttgtcgtctcttgtattgcctgaagataatggctaagtctaattggttttactgtatctagaaatgccaatttcccctgttcctctgctgctagacgcaaagtctgataagcaatcactgaaagttttaggccttccattgaaatcaggcgaacatctgatagctgcttttggtgaagttgataataactcatcatatcgataactgattcacaaaaaatgagtcgcttaggattcccaatatcgaaactaataccgacatggccatgagatcctttcatgatttttttgagataacctcgatcgtatttttcttcatttttgacgagaccttgaaggcttgcggcctgtaaggtcccattatggtcaaagcttttaaacactaaaactgactccgcttgataagtagcttgagcaagcaatccttgtctgccaaaggaattaatagtctgattacttagtccacggatgtctttcaagtaagtacgtgcttgctgaaagggttcttcacgcaaataatattggaagggttgataagtttcttcaatcaccttagcttcttcaaagcctccagtttcaaggtaagacaaggcttttttgaaagacactcctgccactaactgtacaaagtctatcacatccccttgtatatctcttgaaaaccatttgaaagtattggtatccgcaaaaatccgaaaggaatcatggtctgggtgttcataaatttgtcctgataaacgtctgaaggaataacccaaactttcagccacatctaaaatggccttttgttttactattttaattcgtgtcatcttgtctccctatcaaaaaagcagaagactgtctcctgctagttgttctcgcttgttgtagttccttggatcgttggtatgctggaattggctccatctgttgcttctttcatgtcctccagtttcccattccaaatggtcaactgattaactagaagcttgtcggaaactttggagtaggataacataactgtcttggtttctgtctgagttgttcgctgttgttgctcactcaaatcagaaacataagttacttgataggaaacttccgcaagtgcaacatggctttctgtattgacatagatactggctgattcaaatcggtagtcaagcatatagtctttataaacttgattgatcgctttattctgatttgcttcctcttctgaaaatgccgagtccgtcatgtagggtttgatacgagcgttattttcacccagctggaccttggtgaaatattgagtgagaaattcattgacaagctcatctgataggactgtcgctctttcctcctgctttttctttgacacaagtttattggcttctgctcgtatttggttctctgtttgctttgaaatggtttgtgagccaatcgtctagccaatcatgaccataaaactgactgcgattaaacctcctactccaatcagaaatcgagctttcactttatttaacatggcttactcctctattagtgatagcttcatcatatcaagattagcttggagattttatcacaagaaaaaggactacccattggtaatcctccgtgttaaactattctatttctccaccacttcataataatgctaaaaacaagaaatagattcaaagcaataaaaaatcctgtaaaactccaaactccattagttgctaaatcttctgaatagaggtatctctcagtaaagaagaggtaaattccatagatttcaataaagactaatccactgatgagtccgataagaaacaaagcacctgaaactttcacaatccgataaaggacaaacaacatcagtcctattgctgcgaaaatcaaaagactttgtagaatttgctccaacatcttacacctctttctaggctaattgcttacgataatagttggcttgttcctggtcaagttcatcaagttgggtaaccaagtcaaggtattccgtcttcgtcacctcatctaagtttgaaaaatcattctcacgacttttgatgatgagttccagctgtccagtaatttcacgctttgaaaaactgtaatcaaaggtctcatcttcatactgttcctttaaagtttggtagtttgccctatcttctggacttgtatagccttgtgccaaccattcttcaagtttataacgcatttcttctagtgtttgggtcatgatctattctccttttgtgatttcttgacttcattttaccgcgttcaaaattatttgtcagccttttttcttatatctcgagtgctatttgttgcttcttttggggtgttgtatcttcactaaacttggccaaagctgcatctatctcttcaatctctgcttctttttcaaccaagggagctaaaacatcatacttagcctttacaagctgatagtcctcttcctttggaaagactttatcaacttctactttggctactcgtagcttatcttttaaatcctttaccagctcttgcgtcttttcttggtcatctataatatggtcaatggcattactaatccgttgaatggttcccacgtctgatttcaaatcaagggcgacagtatactggttatcacctacaatcattaaagaaatggtttctggtaagggctcactagcacctcgtgtagtcatttttaaatcaaatcctctaaagctggcaagtgtcctgacttccttggtctctgagcggttataggtaatgagttttcgcagatagtccccagcttcagcacgattatccattgcttgattgtcaaatcgcatgacaaaatcttgcgacttggttgccaaagattgggcaatatctttatcatattgactcaaccgtttttccataatagggaggtgcttctcgctataggaaatggtatggcgatactcgtctttggagcgattaaaggctcgtttttgattctctaaaactgtcagttcattttccaactccattttgagtttgagataagggttcccagttgccaatgccttaaagtctgaggcggtcatggtttgttcatcaatgtcttcagctgatctcacaggatcttttgaggtcattatctgggtgatatactttagcttattctcctgcgtctgccagaggtaattgtcaaagctccctttagtaatatagtgataaatatctacctcctggtgcatgtttccttgtcgaattagtcgtccatttcgctggacaatgtctgagggcctccagggaacgtctaaatagtggacagctttcatgcgagattggacgtttaatcctgttccccctttttccgtagaagccatgagaatccgtacttctccactattgaccttgcgtgacagagagtttttcttctcatcagtattggcatcatggacaaaggcaatttcttcttttggtatccctcgatcgacaaacaagtccttaagttcattgtagacatcaaacccttcttccttacttttaggggttccaatatctgagaaaatcatctgagtggctttgtctccagctccatcacggtaaatccgctcgacattatcgactacttgaaggattttctgattatccgataaggagtaagtagggtcaatcaaccgcatatcaatagctagttttctggcttctcctgtgattttaagcatgttatctctacttggatcaacactacctgacttgatagcgtctgaacgctttaccagctcttccaaatagtatttctgagcttgcgttaactcgctttccaccgcaataatcttagcttccggtactggtaaatcaagcatgtctgaggtctgaatatcggcagtttccttgtagattcgcatgagttcaggaaggttgacaaatttcttgaaccgtttcttgggttggtacttatctcctgtcggggctagttccatggagttttcgatattcccaaaagccccaacccaggagtcaaaatttgataccaggtatcgttccaagacatcaggttgaatgtaatccatcatggtgaaaagttcactaatagagttagaaactggtgttcctgtcgcaaaaacgacatttctatctccatgctctgcctgtacttgtctcaccttcatctccatatccacgttctttttagaagttgtgttggtgattccagctacattcccaagtccagtgattggacggatattcttgaagtgatgagcctcatccacaaaaagaaaatcaattccaaggttttcaaactcaataaaggtatctcgctctagtttttggagttcttccaactggtgttctaatcccttaatcgaacgttccgcttctttcaccgtgtaatcactgtcacttcctagcttgatttctcggagttgctcaagtttgtcattgatataggtgacctgtttttcacgactcatcggtatcttctcaaattgtgaatccccaatgacaatggcatcatagtcccctgtaataatacgggacacaaactgcttgcgtttggctttggcaaagtctttcttagtagtcacatagactttcttggtagggaaaaatttcatgatttcttgaccaaactgagcagtcagactagacggcaccacataaagtggtttatgtaccattccgagttctttcagtttgaatcctgccccaagcatggtaagtgttttacctgaaccaacttcatgagctagtagagcacgtttttcctcgacaattcgttgaatggcattcttttggtgaggacgtaaggagatattctgagcaagtccatcaatggttaaatgactaccatcataggactttgataccgtacgattgtagagcctattataggtgtcttcaatcatttgttggacttctggatactttgctacaaaaccttgaaagagttcttgtaggtgtgtttccttggcacgcaggaccgttgttttctctacatccgtcacattctttttcttatccccttcgacaacttgttttgtgatggttggttgattggaattcaggagattttcaaagatttttcgaccactatcatagcgtgaagcagggacacctaaactcctatccgttgcgttggaataggtgtaggcaaacttagattggtaagtgataaccccgtcaatgggactgacttctaggactgtcgctacttcttggtctgacagttcataggctttccccataaaggtttcttgggcaaattttccataaacagccagaggaatccagcgtgaaccgattcgataatcaatgtctgccaaagtaatacgggctggtttgatagcttctagaagtcccgcataatgtgaccagttaaagtcctgattgtcttgtttgacgaatagatctaccacttctaacttagtgacgacatcccctgaaagaaagtcttggcgagaaacataggtcaattctccattcaaatacttctcaggatcaggcataatgaggtcgcctaactcctcaatcaaggtcatctgcgattcaacctgatagatagacatcatataagcgaaatcaacacctcgtccgtcagccaagctcgaatttaaggcatcaagggcagtatgcacctttttaacctctttttcaggacgcactagagccttctcaaaggcaagggatttagtatagataacagactttccacttggatccagactttcatcttccaaactagcaagaagcgaatacttatcatcactatcaaaaagattgcggttcacagcactattcaaatacccatagtgtttgacaaagctatcataggtacgattgagtttgcctaacaagtggttaaaggtctccttatcatagtcataatagcgttgaatggcaataacttcttggtaggcattgcgaatatcgaccattcctttgatacgtgccacttctttataagacaatggagcttcatagaaaactgtctttttataataccccttaaactgaccacgtttggctgcatcatcggtcacatagacatccagagcagtgttatcagtcacttctaaggcattaaagcgatcaatctgcttttgagaatgtttggtgtcccatgctttgaagttgccctcttcatcgacatagtaactgatttcttccgtcttggttccgactcgaatgcctttgttatctcgatagtaaactgtagacccctgataaccaaaactgtactgacctagattttccctcatttcagctggaatggaggtatcattgacttgtttggtcaacacatctgggttaatgatgacctcatttctatcaatctctcttggggccttaacgtgatttagagctgtttcaacacttgcaatcaagtcatcactagtccccttaacagaaagtgttcctccgttaaaattcctgacctcgtaggttcctagcacctggctattgtattctccatcaaaataaggattgagccaaatgcgactatccttgtcatagcgaatggaacctgaaaaggctaaatcgtctgccacatatcccttgtctaagtgtttctggaagaataacatatccgttgtgacactcgttcctgcaatggccttaaaggcagagtcaggcagtcgaaccccaccaagaaattcagttgtctcacgaatatcttgtaagatgttttctgttcgcttatccatagttcctgtggaagagataatcgctacttgtccaccatcatgaagcaaatcaagtgactttttgacaaagtagtcatgaatcatgtaaggcctatcgtacctattatccgcaattcgtatattggcaaagggcacatttgaaatcaccaaatcaaaactattgtcgttaaaagccaccgtctcaaatcccttaatttcaatatgactattgggatgaaggtgtttggcaatagctcctgtaatagtatctaactctacgccatacaactcactcttttctcttaagtgttttggcatagccgcaaagaaattccctgttcccatggaaggatctaggattttgccacctgtaaagccatctctttccaacttatcccacatctgacggatcagggatgggtctgtgtaataggctgtcagggaggactgtttcatatccgaatactctttatctgtgactaggctcttcagttcttctcgttccttagaaaattttggattatagtcatcaaaaaattcattggctagtccaccccagcctacatacttggcaaggagttcttgttcacttggtgaagcattgcggtgctctacttctagattttttaccaaacgaatggccacaatgtttgtctcaaccttatctctagcagtcttaggataaaagtccgtcaaatcttctggaaaataaaagtccgttactggaatctctggaattgtttcgacgacttcctcttcaggaatttgattatctgtttcttcaagatcagtatcgttatgaccattttctgaatcatctggttccaatagtccaatactctgaactggctcctcttccagaaatgagaataggtttaattcttggtccgcttcttctaactctgtttgtggttctgcctttggctgatgaagtgcctgactgacttcttcccaggtcctcacataaagaactggattttgttcaatgatatccgaaaagtcattgactaactcaatccgaatcaaaccgttcaatcgagcatcgctgaccgacatgacctcaaagtcctgtcccttataggaaaccaatgaccccagaggataagtgtccaatactctctgaaccagtggattttccgcgaattcttcatcaactacttcttttccctcagctttctctagcttgcttttccaatctctgagagttaaatctggctgattacctttatctttttcaaattgctccgcatcttctctgctgagttcttggtataaaaaggcgtaggcaacttgtcgcagctcttcaatggaaagctggctaccaaagaaaaattcaaccttttcatgacttagtcccatttggagtagttctgtcgcaagggctagttgagttaccgaggctttgggataaccacctagtaaagcaaggtctgcattttttaaacgaaaacgacctgctgcatccaataaaataccgactcggtctgggtcaaactgagataaatcaatccctagctgagtcaatttttcttgattttctatcctaatggcttgtccaattttttctaattccttttcttcgactgtagtcagcgttcgtttcagctcatagggactgccatcagcttcgagataagtaagtaattcctcgccatcaaagactggtgtcatttccatctctgtgtcaaaatcacctcgtctaaaacttgggactttggaacgttcatttcgaatttggtcaaaatatgttagaatctcaaatttacgtcgtaaggataactcttcataagctggcagatgactggtttttcctatttgaacatctagttgagacaaatctacatccaaactagcaataaccagagagccctcttctcgaaaagatattgcttgatgaacacttgttttgtgctcatcaacagtttcttcattttctagaacagtttcatcagctctagtttcaagctcaggctcgtaagttaagagaaactgttcaatatctcgactaatacgatccgctaaattattagccacacgatacacattgaccaaattagctcccctactcttttgtaagagtgaatccggcgatatggtttggtagtgtccattggaatccaataattgaaaacgagtggccagattgaacaaggccacttctatcaccaagtttttttcagacggcgatagtttatctagtttttgaagaccactttggccgaaaacttgtgtataggtcaatagatcatgagcagtatcataaggactagcctggacaaaagctgaaacatctgtctcaaagtgaagtacttgaacagacttatttatttcttgcctattggtcataaactgatgaataagactatcccactcctcatcaaaatgctctgcttggtaatataaaaatgcctcaagcaaggctctatcacgaggaatagtggctctcatcatttgtagtaagacttcttgattcattttccctcccattttaaaagggctgagagtgtttctcagccctttgagttaatctaggaccaaggttcgttggtctctttcttgtggaataccttccattacaattgccacatagtgttgtaagaaatgacttttctggtctagtaaatctttttgcaaggcaaggtgaaccaaatctccaaaataatcctgactggaaatagccaagtcctgttggatcatggcctgtaaggtttcaaggctaagtggtgaataatcgtcactatccaaaacctcatactgttccaaggtttctgagagactatttgaggacattaaatccataataaaattagagccttcacctgttcggtacagcttttccagaatgtcagtcatatctgcctgtacttcatcctgataactatcaactttaactcgtagctcatcacttatcaaggataggtcatcctcatccatataatcttgataaacctgattgaggattgttctattagaaatacttaattccaaagagagaaaagccttgataaactcttggtaatcgaccttctccatttcagacaaagcctctttcatggtgtcaaagttccaagtcattgtacaactccttttgtgggactaatggtgaatgtccagattgtagctcctctaaatcagcttgaccatcaccatctgtgtcaacagactgcggatcggttcccaaagctagttcctgagcatctgtcagaccatcctggtctgaatccttttcataaatagtttttggattcatctacttctcctcctttttcttcagtccataagccgtaccaagtagaataccagctccaatcaagcccaaaagggattcctgttcccctgtatttggcaaaatacttgctggaacaggcggttcaatagtctcaattggtggttgaggtggagtgggttgatttggacttggttcttcaggttgaggtgtatgtgttacaactgtatttgagctaatgacatagccattcactgtatggagataggtattctccacctgaccagccgcaatccgtttcatttgaaggtaaacatctgcctgaaaggctgaatcatcagagacagtctctaagaaggatttatcaaatgaaattgacacgaggccattttctgtatctacctgttgcaaggtgtatttcgtgacttctgtcccctcttttaagacagaaccgtctttgaggatgacatccgtcatcagatagctgcgataaacaccattatactcatcatgcttttcatcatagttatcttcaaaaccatattcaaataaatcagtcgcacgattgcttggaatcatcgctccaaccaagcgatagttaaaggtttgatgcaaggccacttctttcccgtcaaggctggcatctttatgagacaagtcgatcaccacatctttttgtgggtctaattttggaacattattaaccactgtttccgtgacataggccaagccaaaatcaatttgataggctgtattttcatactgaccacctgttttggtcaactcattttttaccgtcatcggaagcgtgacaactaaggtttgaccagtcttcacataggtatcataaaagacttttggatcatcgctactaagaacttgaatggctcctttaggtgtaaactgacgtttagccatggcatcttgaacaactttcggagcttctgacaaactagcgtaggtgctgacagagataccagatacacgattgccatccttatccaaaacttgaatgccatcaggatttagggtaagggcttcttctgggtaatcgtctaccatgtaaaatcccttggcaagaacatcatccgtcacgaccatatccttgtattgactgtaatccaagacaattttgtaataattgaccgtattcggaagaacagtctttccatcaattgaaataccttcttgattggtattagacttatgtggagttactttagggacaaaattggtcaccgtattggtttcataggcttgcccaaagtccacctgataagccacgttttcataagacttccctgaattaagcatggtttccaaaaccgtcattggagtgacaatggtaatattctcccccttggtcacataagattcaaaaaaggcttgtgggtcctcaggcatgaaaacttgaaaagctcctttaggctgaattttttgtttggaaaaggctgcttgtagcgttttaggagcttctaataattgagaataagacttcaccgtgattcctgaaactgttttgccatcagatgtgacaaactgaatagctgcttcatctggcaataaagcttcttctggataatcatccacaaagtaaaaaccttgtgcaatctgagagttgtctgctttaatccctcggtattggtccaagtcccatgaaagagtatagtgattttgagttcccactagcatgggcttcccgttgatatccactttatccttgtttaggttttgtttcttgggttctggtgaaacaagggtgttggtcacttccttggtttcatagccattgccgaaatcaacttgataagccttgtttgtataggtctttgtctgaccatagagactatctttaaccgtcattttggtcaaaagagctaaagaagttcctgtttgaacatactggtcataaaaggcttggttgtcatccggcataaagacttgaaaggcacctgtcggtgtaatcttagcacgagccaatttatcttgaaggtctttaggggcttcatttagggaagcatagtttttaactgtaattcctgataccttctgaccgtcaagggttgtgatagccgtgccattttccaccacatcaagcacttcctctgggtaatcgtccacaaagaagaagcctcgtgcaattgtctctttagcagaacgatctcccttatactggtccaaatcccaagtcaaacgatagtggttggttgtaccaagggctacgaccgtgtcattaatgaggacaccatccgcattttcattgtttttatctggtgtaatgagcgtggttgtctccccatcacctggtgtacgaaccgttacaacatttgaagtgactgtgtaagcattggttgtacccttgttcaaaaggagtttgtaactattggaataggttgccccatcattttgaacagaaccatagagttttggggcggtcaattgataaacctgagttaaatctttatttacctcctgcaacaagttttcctttgcggttaaggtcacaaaattcttagtctcatcaaagctaaggacatagtttccattctctttttgtgttgtttccttatcaaataggtaaccagcaggcaagtagtcctcaaaaatgagactagtcgtttgggcacgattgggcgataaggcatcaactgttaagggataaatcaccgttgaatcttttgcgacagttttctcatgaagattagcttggtcactattgaccacttctttcataatctctgaagttgtcgtcaaacggtacgcatgataatggacagttggtacttgtggtggcgttggaagttcttttggaataggtttgacaggcaaggttaccttggtcaaagttagactaggctgcactacttcatccaaaggctttggtgtgaaagttacaggcttttctggtgtaaatgtttttggtgtatagatatctggtgttaccgtaataggttctggaatgggttcaagttccaccgttacatgaggtttgggactatatggtgttactgtacgtgccactggtagggtatttaaggcgaaccagtatgacaagccaacattctgtggcatatcgccttggccaaaggttactgtgtaggtattacctgatgtaactgttgagacaatagctcctttataagcataacgacttgatgtggtatcccattcctcaggtaaattcaaatcacttgcacggttggaacccaaagaacgtgctagaccttcattagtcacttgaacagttgaaccattaatcggcacaaatttcccagatgaatctttgacatattctaaaccaatgtcattatgattgagggaagagtgtgtgaagactcctggcttttctttggagaaggtaacttgtgaaccgtcttccaagtaatacttggcaactacacgaaactccatcttgtctgttcgccagtcaccgtttccgtcatttcgataggcaataaaaccctcggttggatcatttggcacaaccaatttcacggcattggttccagctggtgatacaaggttggtaatatcgtaagtcacacgactaatctttttaccatcaaatcgtgcatgttgaagattttgatagttaaaactaagagtctcacctgttttgaacatgtcatagacaaagaatcctgttgaatccaatattcttgagtagcctcccagcaaagcatcgccagttgaaatgatctgatcaggatttcgggtaatggccccatgttgtgcttggggttcaccgttgttgagattgagggcttgagcaagggcttcagaaatataaccttcttcaccttttgaaatctcggccaagtcacgttgatagcgttccatttctttggtattataggcatcaatcgcttcattctcttttctggctgcggcttctttttctttattacgttttgtaatagcttcaatctcggctgcacgatctgaaactaattgttgtttctcctgattagcttgatctactgcggcttgacctgcacggttttcagcatcaacagctgcttgaccagcctgattacgcctttcaatggcttcattatctgcctttgcattagcaagtccagcttcattttctttttgaatggcctgatttttcgcaacaatatcatctgcctttgttttctttgttagataatccgctacagcttgttcgttagttgattgaatggtttcaacagccttgccatagtttgtatagtcaaggacagatgtcccatttcctgatgaaactacttgttcttttactgtcacatcagcatctgcataccgagcttttaggtcattgactttagtatcaacccaagcatttgtctctttaccagtttggttggccccctcgtaggcctgtgacagctccttattttcctgttcgatgcgagctttattcgattcgtatgtcgctttatcagctttgtaggttttagtgacttcattaatagtctcaacctgtttttgggtatctgcatctgcttttgaaatttgttggttggtttctaccgcagatcttgtatttcctaaatccattggactatcttcaaccgtagaaacaccttcagcctttgcttcttcaactgcttgtgttaccgtatcatgtggtacggtaacagcaatcgcaccgttagattgtccagttgatgccatactttcagtttgttcagatacagggtttggttgtgcttctggtaaatttgtggctggattctccgttcgttgaatggtggtgtcaactgaagttgtaacttcatcggcatgtgcaaccgttcctccccaagcaacaacagccgtcaccatggttccaagggcaacggaacatagagtgcgatattttttactcttgcgaaagacgtgtttctcgcctttttcctgattgacaagaaagtgatgattacatgttttggtcataaatagtccttcttttcttttttatgtagcaacaaactgtcactctttattagatacgagggcgttagcgagcacgacaaaaataggagttttgacgaagaactttccgttctatgagaaactctctttttttgtacagctcgtagcccaagttcaataccatcataaaaaagaaggcttgattttgttatcacaataaattgagggaaaagaaaatgttgcttttataccacaaatattgtaaaattgtagtgtaaaagcaacaagtggggggccgtatgtcaaaaaaagagattctactcgattttatagaaaagaacaatggcattgtcacaaacaaagattgtaaagcactaggtattccaacaatatatctgacaagactagagaaagaaggcattatcttccgagttgaaaaaggtattttcctaacccaaaacggagactatgatgaatactacttctttcaatatcgttttcctaaggctattttctcttatatttcggcactgtatctacaacagtttacagatgaaattccacaatattttgatgtgacagttcctagaggctaccgctttaatactcctccagctaatctaaacattcactttgtctctaaagaatacagcgagctgggaatgactactgtacctactcctatgggaaacaacgtaagggtatatgattttgaacgtattatttgtgattttgtaatacatcgagaaaagattgattccgaactctttgtcaagacacttcaatcttatgggaactatcctaaaaaaaatctagcaaaactctatgaatatgcgacaaaaatgaatactttagaaaaagttaaacaaactctggaggttctaatatgaacaaagctaaattaacagcactctgtcataaaatatcaaagaatactggtttaacctttaattccgtgatgacctattacttcctagaagtcattttgaaaaaattaagtcaaagttcttattcaaatcactatatcttcaaaggaggattcctactgtcgaatgtcatcggagttgaatctcgtagcactgttgatattgactttttattccatcaaataacactctcagaagaaactgttaaacagcaactcaaggaaattttagcagattccgaagaaggtatatcttttgtgattcaatcaatcacaactattaaagaaagtgatgactatggtggctatcgagcaacaatttcgtgccaacttgagaatattaaacaagttatccatttggatattgcgacaggtgatgttgtaactcctcagccgataacatacgactataaagctatttttgatgaagacaattttccaatcattgcttatacaattgaaacaattctagctgaaaaactccaaaccatctattcacgaaacttcttgaacagcagaagcaaagacttttacgatgtttatattctttcaaaattgaagaaaaaagatattgatttcaatcagttaaaaaatgcttgccaaagaactttttcctatcgcgaaactgagctcgatttcgaaaaaattattgaactactcgagagattcaaatctgatcctactcagaatcaacaatggcaaaattattcaaaaaaatatagttatacaaaaggaatttcacttgcaaatgtgcttgatgagatgattagtcttattacaattattatttctactgactctgattaaaacttttaactgccccactaggtaatcgtgacattaaaggaaaaggatatgctaactaatcaagttattgttagcatatccttttttatttcgtcgtataagcaaaactcaagctactatccactccagataatttacggaaggtatagtttggattgccattgtagttggtttctgagataaggaatgaaccgtctgggtagactttctccacaaaagccacatgtccgtattctgttggggtgccatgtcctcctcccgcaaaggaaaggatagctccttcttgtggacttgtccctgtctctccaccgagacttgcggctgttcgtacccaatcttggccattgcccatggtactgataattggaatcttctcaccgtttttacctttgagttttagacccagttgattgatacgggctgcgactccccaagtacattggccgtaagcgtaacccataccgtcaccacctcctggaatagagttttcaaaaaggtcttctcgtacagcttcaagtgcttttggatcgctttgtgctgtcccaccgttaggttgactaaagcctttttcaatttggtaataccactcactggctcgtgtttgacgttcaagtagcttatcaccactatttccttcccagtaaatgagaaagagctgggcaagactagctggactgcctgaatttttgaagaagtcctttaaccagttggtgtaataaggactatccccatacaacatgaaatccagttgtaagcctaagtcataccatttttgatgttttcctttggcatattccaacaataaagtatgtctgcgtgaaccatccgcggtatctgtccattggcctaagcctaaaccacgtttgagaatatttgggtaacgtccattgtatatagttggaccattaagtgtgagccagccctcatcatcccacgaactatctgtcgcaccaacaggtggagataaatagtcgccttcagctcgttttggattaatggaggattctaccgaccagttacctagaatggctgcgatagcttgattggtcgcacctttgcttttaagatagtcataaattgccttggctctctcgaactcatcgccgccaaactgaccgatagttggaagaatggtggtctgaacctgaatcacttttggaaagtagaatgctggattgacatagaccaacttatccgtgtcatcatcaaccttttgataggtgacttttagacccgttccgtctttggtctgaccaataatatctcctgccaagacttgttgattttcactcactcggcctgaatgaatgccaaacaaggttagtttagtcttattcactcccttaccagatgtcaaaacaacgttctctccatcaagagataccttgccatccatcggagctacaatgacttgaccttcttttgcttctaagatgatatgatgatgaagcgttggtttctcatcaatgacctcataaccatatcggtaggtcatgcttaaactatcctcatcggtctgtccctgaaagggattgtccaattcttgaagggctaaatagttgccttcttcggtcaattcgtttagttcttcttggtcctcatcagacagcttgtaagcaggttctttatataagtcagacatggatttaatagaatctccaccgtttaagtccgaccacagttgactgagaaattctttgtaggttgttccgcttgtctctatgaaatcatctaacttgtagtcttggtattgatgattcatgtaaaccatgacctcatcaatcttagtgtaaaaggtaattcccttatcgttggttcttgtatgttccgcatcttcccacgtcatgtgggtataactcttactcaattctatttcatcttgttgtatgacactactacctgaaacactcatgaaaaagctcatcatcaaaaggagtatcaagagaatgcctgagacaatccaagtcaaaggatttcccgcaaggacagaaaagaaagtcatacttcccttaatggcttggacgattcctttaaaacctgcgacactttgttttctgacatgatttaaaaaggtttggtagcgtcttcttggtttaagaggtttctggcgtgtgaatccttttccctttttgaagttctggaatcgttcctttccatgagaaaattttgttttggtaaaccgcacaccagtctgtccactttttactgccaccttacctgcttgataagtaaacctgccatagcgtctggctttcaaactagtatccttcatggttcttagaccatctaaatcatcctcctgtgctatcaggtcaagggattcagatgcagccaagcctaatccagctttgactttggtagagtttttcttagtcttttggactttcttgagttgtttaacctcacgcttggcagaacttacgtctttttctgcacttagccgatcaaatgatttttcttggtgaaactgaaagcgagacttcagggaaggattttctttttggaaagtaaacttgggattaactacctgctgtttctcacttagtttcacttctgacagatgttttcttgccgtccgcaaacgttcttgagcttgcggaagtcgatagttcttgatttcctttgccttcaacagtctaggagaaacataggtaatttcctttatgaacttctcttctgcttccttttggctactgagtagatttccttttaactctgttttcttttcctgaaacagagaatttttggctgattttcgaaatcttccttttttaggaacagtctgttttaaggtcctaacttctttccgataatgcatacgagctgattttaagttgcttcgaaagttttgcctagcctgtttgactagctttttatcctctttcatctcatgtcctcattttttcagggtccgtactcatgatgtcaaagagcttggtgtgttgcggaatcttattcttgaacggaacaacggtggaaccggccttaattaagcctgcccctttttcaggattgaccaagtacttctccagctctttagaaagcccaagcatatgcaccaattcttcgcgatcgctcttagcctgttttaaaagaatcatgaactcgctattggcaataatgcgtctgccattggcatccaaaagaagcgtttctacattctgagtaatacctgtcggtatcgccccatacttacggacacgactccaaagtttgaaaaagaaatcagaggcatacttgtccaataagagtagctgcatttcatcaaagtaaatccaggtcttcttccctagcttttggtttttgaccacccgattccaaatttggtcaaagataaccatgagggcaatttgttttaactcatcgcctagctttttgacattgtaaatcaggaaatgactgtctgttttaatattggtccgatgtgaaaatatgtccagcgacccttccacatagagttccatatccagtgccaagtccttagcttcctgttcaggttgttgagataagacaaagacccattcgaccaaggacggtgtgtcaaaatgcttatatgtcaagcgtgtcacacgatctatcaaggatttttcacgaccatccattttgcggtccaagagctttccaatccaagacaagagaaattcggatttgaccttaactgggtcctcatccatattctcatcagatagttctaagacatttaagaaggtggtagagtctggggcaatatcaatactctccccaccaaaggcttgaccgataatactgtactcattttctgggtcaacaataataatttcagtatcactatctgcttccttgagcttagttgagatgatttcgtgttttgtcgccatccctttgccagctccagaagtccctaaaatcaaacctgatggagtatttaacttgccacggtcaatactgatgatattacttgagatttgattgatgccataaaatttcccacccttgtcatgaatatctacggaagtccaaggtgcattcacggcaatatttgaagtcaatagagaccgagaaacaccttcgagatagttcttcccaaatggcaagagactattaaaggcagcttcttgcatataggtcaagttatcaataatcatatcattagaccctgccacttgcttgataatatcaagagattgtttgagttggtcttcagtatccgctagcacgccaattagaaatacggtgtcaaacagtttatctcctgtttgggtcatggtttgaagaagagcttcagcttcatcgatgttgttctcaagaacatggccgaccttctccaaatagattccagtccgagccattttttgttgttcaccaatcttttgtgattccatcaaggtcttcttggttcgtagcttggtcatggtttcagacttagtagagcctttggcatgtaggctaatcatcacttccaaatctgactgcatgaggtctcgaataaatttatcccctaactccatgccatagtcgcgaacataaacaatctgtaataatcgatcgtccaattcaatatgattcttgtgtttaaaggaaaggtaggttggggcaataaagtgtttggtggattgacctgagagagtcaaatccttataagaaaacggtaaatgattttcacctcgtaacatatccgcaaggacattcactcgctcctctccaccaagtaaaccaagagatacatcaatctctgaaaagccactcttgaaatattccccaatctgtgacagagaacgaaaagctagttttggtgtttggtcgctcttgccaaatgaaagaaacttgacagctgaaaagttgttctcacccgcctctaagttggcatccatcatgcgattcaattcatcacgataagtatcaaacccatcttcctgcaagggatagagaatactcttacgaaatttttccaaattaactttttgattgaaaatagtcagttggaaattggtcttatcatccagtgaattgattaaatcggaatatttctccacgatagctcccttatcatctaagccaactgtttggtaattaacatctcctaagagataggtttgtgagaaatagcttggactgacctgcataaggccattctgaaaaagtccttgataggctaacgtatttacggtagaagggctgatttcctgtttctgtgttttcgtcttttgctttttgtcattagaagaggtctttgatttcattgagtgttttaattttttcacgttggtctccttttcttccagtaaatgtgcggtctggcaccgttagttcataatgaaaacggtacttgaggtatatttcaaatggtaaatcgttggggcgatagaccccaaataacatgagtggaatggtaaagctaaaaacaaaaccatagacaaaccaatccccaaattgccaataaaataggttcaagcccaaaaccaaaatggttagggcgacagctggaaatacaaaaataacctgtctagttgtaaatcccagccatgccctgtgttgaacctttgagatgtccttaaagacacgtgtgttcataaatgttctccaatctaaataagctataaaaagaggaggcgagatagtgactcccttcctcctacatccccaaaatacttcgggcggttcgttgactgccaaccaaggcaatgattaacaatatggcctgtaccaagccaccaaacataatggcgagtgattccatcactccagctccatttgatacggcaatctttccagccgattcaaacaagggaacaagagatacaattagaaaaatcaaaataccttgaacggcatagaccatgatgtttttaaggtaaccaatcccaacacttctccagtcatcactaaggaaggtcggaatggtaacaggggcaaaaggaatcatcagatagagttggataaagcgaatggtaatcaagatattgacaaccataatactggccattcgtaccaaccaaatgagaatcgcaaaaaagccaataatcatttttcctacaattccagatcccttaatgcctgagatggtatcataattagcaccaccattcgtgacaagacttgccacttgttcaataacatatgaggcaatggcaataatggcttccacaataaccgtcgtattggtaatcacgaccgcgaccatgatgtagctgacaatcataggtgctatggcttcaaaggtcattgcaccgcctgagtttgcgattttcttggccatttttgaaaattcgagtacaagaactaccgcaagaatagctactcccaagggctgcataatacccttggtaatggctgtcatgtaagaccaaaccgtcggattaaagtccgccagtgacttaaccaagttagcagttgattctaaatcgacctgaaacccttcaaaaaggctatcgcttgacactttttcagaggctagaaatacaaaaggtgacgtaaaattcatcatcatgtcatgttctgacctcctctaaatggtaatctgtgtcacaaaagcacctgcggctcccaccatgacaccaccaacaatttctaaaatggcatttcggacgcctggcccaccatctttaatgttggttgaaaggttgataatgcccatgactacaagaaaggctcctactgcaatcaagcctttttgtaatagagacatggcctgggagaacatggagctggcgtccactccgtaaacaaagcctgttagtttttgattcatatttttcctcatttctattaatgtagtgacgtttctgtgcttaaatcccttatttgatagtctgacaagtccaattcttcctctttagccaagggattgatgtgatagttccaccaacggtcatcggtttccttatcagcgagcaacttccaatgtttatgtttgagaggaaaatatttcttggttcgaaaaacaggaacccctgcaatgcgtacgaggcactcatctcgtttcatagttccaacttcatcagccgtcatcaagtcacgagcaattttctgatgagaggtagaacttgaacccgtctgcccaaaagaacgactggtgcttctgacatcaacggtttgtttgcctaaaagtccactcatgaatttgaaagtttcctcgtcattcccacccaaatagaggagactgtcacagttccccagtatagttttccaagcttctttttccttataaagtccttggagttgagcgatattttggagaataggcacaagactcatattcctagagcggactgttgaggtttgttcagcgaagtctgggatttctccgacattcgcaaactcatccagatagcttctaacatgaataggcagttgccctttaaagtcaacatcagcctgtctggtcaaagtggagaaaaccgtagagaaaaataaagcagataggaaacgaaaggtcgtatcattgtctggaataacaagatagaccatggtcttttgagtgccccacgttttcaaatccatagtgtctctttgcgtcaaatcaatcaccgattgaatattaaagagggcaaatttagctgttgtgaccgcaatcaccgaatccaaggtcttatccttatagttttgaaaatctgcccagtttctcatggtaaagttctcatgaccatatttcttagcatagtcttcaaacaggacttcaagtatacttttgtcctgattgtctccctttgataagagtttgatgagtttcccaatctcagaaaaggctggataacggccacgcttacgtcttgcttcctgctcttgcttagaacttcctggaggattgtaaaaatccaccaagtaagaggcaatagctctcaccaatgtcatggaagcctcatcccaaaacggatcactgcgagaaccatttcctttggtattattaaaatagaccgttaacatacggttcaaatcattctctgtttctacataacgaaagggattaaaaccgtctgaattggtcatattaaccaagtctaaaaccttaacctgataaccgttttctaaaaagagtttacctgtcttctcagccaaatggtctttcggatctacgacaatattggaacagttaagttggataaggttgggtttcacaaagcgaaaggtcttacctgccccagaacccccaatgacaatcaaatttttatttcggtcaaactggggtttcttcttttccaacaaggttagacgaacatcacgagccaaaatcgtgtcattgaaaggattcttactgtaaaagttccgcttttccttactggttccaaatcgtgcagaaccatattcttccccttcccgatagactttctgtcctgtcgatacataaagatagactagcgtcatcattagaaccccaaggataaaggcaagaaaagatttttgagtaaaggaaaatagccataaaggattgaaaacctgatttaacccctctcctaagaggtaggcaatacgttccataggtggggcattagttaaactatcatagagtagggttagacgatggcagaaatagccaaaggcgagacccaagagtccaaagacaaatgctttttgcctggaatacattacaaggtcacctccttggtttttactgccgaaagttctgtcactctaattttctctttggccagttctatctcttggtccaaggttttatcaaaggttaaaccttctagcttctctggattagacatcagtttcttcaacaattcatccaagtgatgatcgagcaaggtcttatccttggcataaaagtagagatagtctttttgccaactaattgcgattggcagtttttctgactccatcaactccttaaatttctccacatcgattggcttatccagtatgtctttactaacatcaatcgcttcaatggcgtaaggactttgaaggagttcttccattttttgaaccccaatcttataagctgaatcttgagctaaggcttgcctagccgaccattctaagagttttaagagggttctgactgtcaataaactacttctttctacgtattgcatcgcttgacgttcttgttgttcagatgacatagtggcctcctcttttttcgattccctatcaaacataaggtgcttccataatacggaagcactcttgattttggtatcacaagaaagttacgacataagccaaactattccaaagtaaatgtaaggcgattgccgtcatacaatcagttttcaatcgaacaacagccaaggtcaagccaagacagctatagatgagccaactccctaactgattaggtccatgggatagaacaaagagaaaactggtcacgcctatttgttcaaaagggaatgtcaatttttcccacagcaattgcctgtaaacaatctcttcaagaatacttgcattgaccagaaacaataaaaagataataggaggaacctgttttcctacttgtaccaatactgcttgattcctagtctgaactggaaataggaaactgatgaagactgcaaaagcaaccatagccacaaagccaagaagcaaccaacttaggcgattttgtacgcccacaatttttaatggaacagttttatgacgggcaatctctaagcaagtcacacttaataggaccaattgtagcaagactataccctctattgtcagatactctttcaggaataaactcaccagaagaccgttaagctgtatggctagataaaacaacactatccttatcattgtcacctcttaaataaatcttcataatcaatatctaagactagaacaatacgctcaacccatcttatttgtggcatcagacgattagatttgtaatgccgtaatttttgatagaggcgattaaattcacttggataaacatattgaccgttgaatactttgcgagctagttctgcccaagtgaggtctttttcagccagaatgatttctaaattgtcccaaaatcgttcattcatcttcacacctaccctgtcacttgtttcatcagactggcctgaaacaactcttcttttacctgtctgggaagaaaagtacgtacttcgtctagcccaatagctggatagacgtgattctgacagacaatgagaggcagacgaaggttttggtctggcttttggagaatgagctgaatcatctcattcaaacttatcgaatattgacttttaaagcgaagaaatcgtggcgacagcaactcaaaacaatccgtggttttggcaaagagtgacagtatgatttcacggtttacctcacatgcttttgtacaacgataagccactccataggtcgtcaaaatggttagtaaatcttgatttgtattggtattatttcctagatatacctcaagcataggcacctccttatagggttaggctattttcaactgttggttcaggagttgagaaatagcgactcatatcaatgggcatccgtccttcaccaaagcacttgaccgtcactagagtcgttaaaatgccctcctttcccctagcagaataattttcaccaaaggcacgaaaggccaggtgattgtctttcgtcaatagtgtatctacaccatttttaatatccctagtttccataaaatccgaaatctgatgaagattggattcgtagaataggggatcattcatctctttgtggtaatcatcttcaaaagttacctcaaagtcacaatcaaaattggggagcgacagtatcttttgtaatagctgattggtttcagcttggtgaatacgttcttctaattcagtacaatctaggatacttttcttatgtagtaagttcatgtttttcttcctcttccgttcttctaaattctctggcaatggcttcaataactgtgacagtcacgctattgccggcctgtttgtatagttggctcttactagaaacactctctgctctttcataagcccaatcaggaaagccttgaagtctgaagcactctcttggtgtcagtcgtcttattctcaggcgataaagtttcccctctaagacaatgcctgtgacttcataccacttatcctgtcgatattccagagcagcaactactactcccatattgtctgaagtcgtcagagtattggatattccctttcccacacgtcccctacgtttggttgagtctggataagccagattgacagagtctccaagagttgcctttgcgtaccctgttttagtggcttccttgattttcagaaatggcagctcctccctcagcaaaatctttggcaccttgtctccaccttgcatggtggtcaaggtcggtgacaagccagaaatgtcaaatactctaccggtctggtcaaagctagtcggcagatttcctgcgacaacaactccgtgtttgtcttgactggtcaaagtaaacatagggtcttgattgtccttaaatcgacgaccatgttggcgtttttctagtctatctggtgttaagactggaatggcgatttttgcaccctctcctttacctcttgttagtgtaggagcaagtccactcgtcagatagacttcaccattcaaaccatgtttagagggattgatatttcctagcctttcaagatgagctgggctgtcttctcttctgagaggaaatatgaatctggaacggtatcttctagaatgtccgataataaagacccgttctctgttttgcgggacttggaagtccttgctgttaagcacctgccattcgacatcataccccaattcatccagcgtggagaggattgtggcgaacgtccgtccctcgtcgtgattgagtaggcctttgacgttttccaaaaatagaaaacgtggttggatttgtttggccgctcgagcaatctcaaaaaagagagtccctcgagtatcttcaaatcccaatcgtctgcctgcgagtgaaaatgcttggcaaggaaatcccccgcagatgatgtccacttgccctctaaattgtctaaagtcatggtctgtgacctctttaatgtcatggtattctatttccccttctgtgttaaacatggctttataagatgttctagcgaatttatcaatttcacaaaagcccaggcatttatgaccctgtgattccatccctagcctaaaaccgcctatcccagcaaataaatctaaaaatttcatttttcctctctttccaactaaaaaagagccttacacttgtaaaactcttgcttatatatgatcatccatttctggtgcacggatgatttcaacaatcaaaatgatgatagaaatcagatagattccacctagtatccaccaaatcatcttattcacctccttttacttcttgtcgtctcagttgcttggtccactccgacagcacaccattaaatacgtattcagctattacttcggctgaccgagcaaatcgcatttgttccaatgcatactgataccggtcactaaaataaatcatggcatagtcactagcagactgagatagacctgtctgtcttaactggtcatgaaccaaaccccaaatatagtctcgatcgtacttggtcacgccatcgacttttgaagtaaagttttcttcttttttctcatctactagctgcctctcctcctcgtccttcataactaagtcactcccttcagtttcactatatttagtctcacttccttcagtctcactaggggctgaatataagaccggccccgtctttctttgagactcccctagtgtttttttaacactagccccgtctgtatgtaagactggggtaggttcatgttctaattcccccaagtaaattttatttgccattcgacctctttcactagaggactgttggacttcatcaattaagccatattcacgtaaggttttcttgatagagagtagttttgactttgaacagcctaatagtgccatcagatttgaattggaataaatcaaataaatagccccatcctcatcaatccagcctttactcaaagacaactccaaccgatcttttaaaaccgcgtaggctaccttaacttccagcttcatatccttataacgttcactctcaaacaaaattttagggagtttataataacgctctgatgtctgatattgattagcggtaatacgtttcatgattgtccctccaagactaaaagtccaaaattcccgaattcatcaaatcggattaaacctgtttgttccatttcatttaccagttgagttgcttttagattatcaactcccatgatggtcatgatatggctcttcacgatatgacgtgatgactgttcttccttttgcataattacctccaaaacgcaaaaatggggtagacaatctagtgtctacccccgaaagtttattaaaacaaaaatcctgccaaagaatttttggcaggatttttggcaggaaaccaaatcaatttatcagtttctatcaatcgcttatcgctctcaaagactggtaaatagggattccgcaatctaattatgatatgactcttatttaagagtaactgaagcacctgcagcttcaagtttttctttgatttcgttagcttctgcttctgaagcaccttctttgataactgatggtgcgttatcaacgatagctttagcttctttaagaccttcgcctgtgatttcacgaacaactttgataacgccaacttttttgtctccagcagctgttaattcaacgtcaaatgagtctttagcagcagcagcttcaccaccagcagcggcagcagctacaggagcagcagcagttacaccaaattcttcttcgatagcttttacaagatcgttaagttcaagaattgtagcttctttaatttcagcaataatattttcaatgtttaatgccattgttatttcctccaaaaatatgttttaatataaaattatgtagctaggctacttgaagagtgcttatgccacttcttcgtctttttctgcaactgctttgacagcatatgcaacgttgcgtactggcgcttgaagtactgaaaggagcattgaaagcataccttctttgtttggtaatttagcaagagcgttaatttcttcaactgaagtgaatttaccgtctactgaaccacctttgatttcaagagcttctgcatctttagcgaaatcgctaataactttagctggtgcaataacatcttcgttagaaaacgcaactgctgatggaccaacaaaaagttctttaaggtcttcaagacctgctttttcagctgcacgagttaaaattgagtttttgataactttaaactcaacatcgctttcacgaagtgaacgacgtaagttagtatcttgctcaacagtaagaccacgtgaatcaacaacaacgatacttgctgctgctttcattttctcagcaataagttcaacttgttcagctttttttgcaataattgcttcactcattagttttacctccgtttttattttttgggataagcacaaaaaaatcgcacctaaacctagacacgaaagtacaatacgttattttataatgacgttttgtgcctcggtaggaatattatgagcactgctcccctactgtcttaggtcagtttcatcagaaactttaaatagtataacttataattctagcattgtcaataatttttattatttttctgaaataattttatagtaccaaaaaatactaaaatagttatctttatatcaaaaaaataatattttagtatttatttattgacctttactgactaaaggtgtattatagtaccagaaagataattaaatatttaaattagacctctctatatgtattaaagtataggaatcaataattaactttcaaaaattaaaatcaattgaggtatttaatatatggcaaataataatttttataatcgtgacccttttggaaatatggatgatatttttaattctctaatgggaaatatggggggctataacagtgagaataagcgatacctaatcaatggacgggaagttactcctgaagaattcagtcaatatcgtcaaactggaaaactccccggtcaagagctaaataaccaaaacactcctacaaaccaagtctctgcagatagtgttttgactaaattaggaactaatttaaccgatcaagcacgtcagcatttgctagatccagttattggacgaaacaaagaaattcaggaaactgcagaaattctagctcgtcgtactaaaaataatcctgttctggttggtgatgcaggtgttggtaaaacagctgttattgaaggtttggcacaagcaattataaatggtgatgtccctgctgctatcaaaaataaagaaatcatttcgatagatatttctagccttgaagctggcacccaatataggggtagttttgaagaaaatattcaaaatatcataaaagaagttaaggaaacaggaaatattattctcttctttgatgaaatacaccaaatattaggagccggttcaactggtggtgatagtggctctaaggggctcgcagatatacttaagcctgcactttcacgtggtgagttaacggttataggtgcaactactcaagatgaatatcgtaacaccattctcaagaatgctgccttagcacgtcgctttaacgaagttaaagtcaatgcaccttctgcacaagatactttcaatatccttatggggataagaaacctctatgagcaacatcataatgttgttttacctgactctgttttgaaagcagctgtagatttatctattcaatacatcccacaaagaagtctccctgataaagcaattgaccttattgatatgactgctgcacacctagctgcgcaacatcccgtaactgaccttaaatccttagaaaaagaaatcgctgagcaaagagacaagcaagaaaaagctgtcaatactgaagattttgaagaagctcttaaggtcaagacacgcattgaagagttacaaaaccagattgataatcataccgaaggacaaaaagtcactgcaactatcaacgatatcgctatgtcaattgagcgtctaactggagttcctgtatcaaatatgggtgctagtgatattgaacgcttaaaagaacttggcaatcgtctaaaaggtaaagtcattggtcaaaatgatgctgttgaggcagttgcgagagctattcgccgaaatcgtgctggtttcgatgatggtaatcgtccgattggtagctttctatttgttggaccaactggagttggtaaaaccgagctagcaaagcaattagcttttgatatgttcggatcaaaggatgctatcgttagacttgatatgtctgaatataatgatcgtacagcagtttctaagctaattggagcgactgctggttacgttggttatgacgacaatagtaatacactaacagaacgtatccgtcgaaatccttattctattgttcttcttgatgaaatcgaaaaagctgacccgcaagttatcacgcttctccttcaagttctagatgatggccgtttaactgatggtcaaggaaacactattaactttaaaaatactgttatcattgcaacctcaaatgcaggttttggaaacgaagcatttacaggtgacagcgataaagacttgaaaattatggaacgaatttctccatatttccgtccagaatttctaaatcgtttcaatggtgttattgaattctctcacctaagcaaagatgacttaagcgaaattgtagatttgatgcttgatgaagttaaccaaacaattggcaaaaaaggaattgaccttgtggtagatgaaaatgttaaatcacacttaattgaactgggttatgacgaagcaatgggagtacgtccattgcgccgtgtcatcgagcaagaaattcgagatcgcatcacagactactatctcgatcatacagacgttaaacacctaaaagctaatttgcaagatggccaaatcgtcatttctgaaagataaaaacaaaacccgtttggaagaatccaagcgggttttctagtggattgaaaaaggaaatcaaacttaccctaaccttcttcaagatactttacttattttaaatgtgcagagaggtcagcaatatcagctggtctagttcggcaacaacctccgacaacttgggcgccaagtttttgccagtcacttgtattttcaagtagggtgtgtgaatgatcagggctagattgccaagattggcttgccccatcataaacctctccagagtttggataggtcacaagaggcttgttagtctgctctgctattgcttgcaagaaatcagcaactaacgatggacttgaacagttaatgcccagcgccacgacctgtgggctaacatcaatagctttcgccaagtctgcaacagcactaccatctgagatggtcttaccatcttgagaggtgaatgacatataagcctcaacctgagggaaatcctcggcaagtagctcaataagagcctcagcctcctgagcgtttggaatggtttcaagtgccagaatgtcaacaccctcatctaaaagaagctcaatacgatggcgatggaagtttttaagaccttgcttatcaatatcgtagagtccagtgtactcagagccatccgctaaaaaggcagcgtagggaccaacatccccagaaatcaaaggatagattctctctgatttttcttcttttgtcaaacttttccaaacttgctcacgcgcagcttttgccaactgaacagtcaagcgaatcaaatcttctgtctgactttcagagacaccaacttgagctagtccttgtaaagtcgcctgataagttgatgtcgtcacaatatcagcgccagcacgaatataatcttcatgaatggtctgaatagctgctggatcctcaatcagatatttggctgaccaaagtttcccagaaacatcacaacctctactctcaagctcggtccccaaggcaccatgtaggatgagagtttttttactctctaaaagttctttaaatcttcccataagatcaccatttcttgtaacgtagtttgtgataaatatagcagaaaataataaatggaacaccgaagtaaagcccagcacgttgtgagctatcccaagcaatccctacaatcgaaatcaagagcaaaatgattgtgatataagggagaactggtgtaaaaggtgttttgtaagacaaatcttctagttgattctctttcaagaattccttgcggaaattgatttgtgcgactggaatggctagccatacgacaacaacagcaaagcccgcgattgaaaccaaggctagataaactgtgtctgcagcgtaaatacttgaaaagagcgacagcactgctcctgccattgacaagagaagagcacgcattgggacaccgtgtttattgattttcacaacagattttgacaacataccttcattggcaagggaccagagcatacggcttgatgcgtagagacctgagttaccagcagacaggatggctgtcaagataacgaagttcatgatatccgccgtaaaagggattcccatcttgtcaaagacatcaacgaatggtgctgtggatacgcctgcctctttcattggcaatagcgaagctaggacaacaattgtcagtacaaagaaaacaaccaagcgaccgattgtcgttttaatagcccttggtacagcttctttgggattatccgtttcaccagccgcaataccaattaactcagtaccagagaaggcatagttaacagccaacatgactgagacaactgcaacgataccatttggaaaggcaccattggcagtcagatgagtgaagagaatagccttgtgctgaccttcaaaggaaactagaccaaacatagcacctaagcccaagataataaagataatgatagcaataaccttaatacttgagaagaaagactctgcttctgcaaaaaagcgtacgctaagagcatttaaaccaaaaatcacaagggcaaaaaaggaagcaaatgcccaagccggcacatttgggaaccagcgctgcatcagcatggcagcacctaaaaattcagtccccaaggcgaccgtccaacaaatccaatatagccaagcaacagtaaaacctgttccaggactgataaacttagtggcataagtgtggaatgaccccgtcaccggcatggcaaccgccaattccccaagtgatagcatgaccaaataaaccacaacggcaccaatcaaataagacagcacagctccaagcggaccagcctgtgcaatggtataacctgaactcaagaaaagcccagtcccgataacaccacctagcgataacataaagagatgacgactggtcatcttacgctggaatttaccttcatcttcataacgatgattttccataacaacctccaagaaactaatacttttatcctaccacaatctagtcgtattggggaataggtattagctatcatatatgataaagaaaaactattacaaaaaatcagcgaatcataaatagcggtaaccttatttttttatccttacaaaattaacgaccttatgaaaacggtccatttgccaaggactaataatataattggtctccttatccttcaatagctgtacaggtgcaataatgctagttagtacacagacaatcaacatgataaaaccacctagccaatctccccaagtgagcattccttctgcactagcttgatagatgtatacgcaagctattggtactaggagaaatactgtcgttgctagaccaggattataccaagttttaagtttaatattcatctgaaaaccatgacccaagagctgcgttagactaaagaacatgactcctaatccaagccaataagcttgaggaaaagcaatactagcaatgtaaagcaaccaagcaatagtattaaccaacataatagactgagtattgcctggaaaacaatccatcagctcttcttcatcataaacaacatagttaatgataggtgatgccccaccgggaaactgatattcttcaaattgatgcgctagaagtgccataaagtaaaaatacaatagatagtgaagcattgaccagtcaggtctaaaaacaagcaatattactgctaaaataataaataaaattgctccaaaacgataccagtaatttctaaaatatgacatgataatacctcctatttaaactgtgtttcacgaaaatgtgttaaaaatggttttgagcgtgaaagatcaacatcactaaatgcgtaatttgaatgtcgacctaaacgcttatagattggggaacgaaaggctataaagtagttaagaacaatccatatcagcctaaaaaccaatcaagtccagaatacaacttccaatcatgagctaaataatagacagaaacagggacaagacctactaaggtcgtaagaagtcctggattataccacttcttcaaggaaagattaaaaaagaaaagatgcatggcaagttctgcaaatgcaaaaatcatgactgcaagtgttaaaaatggtatattgggacaaaaaatcggcaaaagataaacaatcactgcaaaccactgattcccgaaaaaggctgatagatggtttaagtcccacttactagtatcagtttcaaccgatttaagttcaactagcatagtgataagcggaaaacctccagggaaaccaaattcttcgaaaaagtgtaattgaataaaaagtcccgaaataagtagtgactgcactcgtaaatcccaatttccaaaaaataatgctaaggcaaaaagagaagcaagatagggacaaaagaggtaccattttgttatcaatgctttcataagatgacctccaagatttgtgacatttgataccatatagtataatcaagtgaacctataatatcaatacctttggaggttttatgcacaaatgactgaaagtgtgacagttaataaaaagagaataaaacaaatcactcaaacacaagaggatatcttaacagcttttggccaacttttggaagagtatccctatgagaaaattcagattagccaaattgccaagaaatctggctatgctagaaggaccttttaccgacactttgacagtcgagatgacctacttacccttttcatcgaaagactaacattaaatctctttaagcaacttggtcaattggagcaacctacttttagccaagttttccaaaatttttttagttattggtctgattataaatcccttcttctcattcttagaaagaatgacctactccctcaatttcaacaatcctggttccgacatattgatttgatagagttaggtcgtggtgatttatcttccaatacctatgctcagcgatttgcgattggtggtattttcagtgttctaattgagtggattcatcaggactgccaaacaagtatcgaagaattaactcaactttccttcgatattatcaatcatttaaaaaattaaaaagagctttgcagtagtctcaacagctactgcaaagctctttttgtcataaactctcaaattataactcagataaaatagtatcccatgattcatcaagacctgtgcggtcaacagatgaaaagacgatgaaatggtcctttttatcaaagtttaatttcttcttaatagacgactcatgtttattccacttgccacgaggtattttatctgcctttgtcgctacaataattactggaatctcatagtacttaagaaattcatacatttgaatatcgtccgcacttggatcatgacgaaaatcaactaaactaacaacaacacgaaggttatcacgtgttacaaggtactcttcaatcatcttgccccacttagcacgctcagttttagacaccttagcgtagccatatccagggacatcgacaaaacgcagtttgtcatcaatgttataaaagttgagcagttgtgtcttacctggcttactcgacgtacgcgctaggtttttacgaccaagaagcgtgttgataaagcttgatttaccaacatttgaacgaccagcgagagcaacttctgggagatcatcctgaggataatgtgacttgttagctgcactcaataaaatagacgcattatgagtatttaaaaattcttctgccatctctatctccctaagccgtctctaaaacaggcttgtcagtaccctcaacagcagcctttgtgatacgaacttttgttacatcttcttggcttggaatttcaaacatgatatcaagcatcgtttcttcaataatagaacgtaaaccacgtgcaccagtcttgcgctcgatagccttatcagcgatagccaatagagcatcctggtcaaattccaattctacaccatcataagataataaggtttggtattgtttaaccaaagcattgcgtggttctgtcagaatacgaaccagatcttctgcagtaagaagttctaacgctgcaactactggtaaacggccaataaactctggaatcagtccaaacttttgaatatcctcagaaattatctcttgcatataagaagcgttgtcatcaattttacggcttgtctgtccaaaaccaataactttttcgcctaaacgttgcttcacaaggtcttcaataccatcaaaagcaccaccgacaataaaaaggatgttcttggtattaatttgaatcatttcttggttaggatgtttacgcccaccctgtgggggaacacttgctaccgtaccctcaataattttaagaagggcttgctgtacaccttcaccagacacatcacgtgtgatagaaacattttcgcctttcttagcaattttatctatttcatcaacgtagataataccacgctcagcacgttcgacattataatcagcagcttgaatcaatttaagaagaatattctcaacatcttctccaacgtatcctgcttcggtcaatgaagtcgcatctgcaatagcaaacggtacattaaggcttttagccagtgtttgtgctaagaaggtttttcctgagccagttggaccaatcatcaaaatgttggatttttgcaaatctacatcatcgtcactactctcggtataactaacacgcttgtaatgattgtagacagcaactgctaaagcacgtttagcacgatcttgccctacaacatattgatttaatatttctaatagttccttaggttttggtacttctgctaaatcagccagtacttcctcagctaattcttccttaataatttcttgtgataaggccacacattcattacaaatgaaaacaccattacctgcaataattttttttacttcatcttggcttttgccacaaaatgaacaatagacattcatatcgttattacgattcccagccattttttcctcaacttttctattcatttaatttaaaataatgttccataaaaggcatggattgtgttgacaaggttagtgaaagcattcatcaaaaaaactgttcctaatccatatctttttttctttatagcaggaattgcacataaaacacaaatcacagctaaaaatgcggtaaagaccccaaaaaggctacgttgcattgaatagtattccttccttatttttcaaaatatgtcacagtaaaagcatgagcattctgctcatccttttcaaaataatctctagagataactttaaactcagatagattaacatcaggaaaataggtatcacctttaaattttccatgaactttagtttttatgattgcttcacaataaggcagaaatgctttataaatacttgcaccacctacaataaataaggtcttattatgttcctgaaaccattttataacttgttcaacactatttaggactgtcactccatctgcttggaattgttcatcttttgttaagatgattgtctctctaccaggtaaaacacgacggttcattccatcaaaggtctttcgtcccataagcaaagcctgccccatggtcgtttctttgaagtgatgtaactctttaggaagcctccatggtaaaccgccattaactccaatcaaatggtcttcatcttcagcccaaatggcaattatttgctttgtcatgacttttttcctcactaacttatctctagatattctaacaaattttacctcaaattgcttgttaaaaaacatgagatagttagattgctaaatcaaaacgtaattgaggtttaattgggtcataatcaactaacgcaaaatcatctggtttaatatcaaaaaagtctgttccatctggaacattcaatactagtttggggttacactcagacggttggcgttttaagagttcctgagcttgttcaaactggttatcataaatatgaagattattgataaaatagaaaaacttcccaactctccaaccaaaatgctttgcaatcatcatctgaagtgctacatactgcatagcattaatatgatgtgcaactaacatgtcattagaacgttgtgttaatgtggcatccaaataaagctcaccattaacgcgtctcacatcaaacatcgtttgaaaagcacaaggtagtaggccttctgtttcttcaaatgcttcatagtcccataatgaaataacattacgacgattccaagggttatcttcaagctgttttaagagttttgatataatattatgttttttaacaactgcaccgtagcgctgacctatcgtgccagtatggccaacttcccaatcattccagtatgtcacaccatatttatcattcaaaactgctaaatcatttgtctgatcttgataaatccagaaaatttctttaatagcagattttattggaattggacgtagagttgtaataggaaattcaccctttgataaatcatactctgcaaaggcacctgtaatatacttagaattagccatttccccatttttatatctaggtctggcttgctcgctaaatacaccttcagacataattttcgtgatattgtctttaaataataaatcggcttttgtcatgagatacctccaaagtcttattttatcagattttaaaaagatattctagtgagaaacaagactttgaaggttaaagctttttttcatatttttagcttctttatggtaaaatggaatttagcaaaaatgacttttattcagaaaggtttaccaatgaaaataggaattgataagattggttttgcaaccagtcaatatgtccttgaaatgactgatttggctattgctcgccaagttgaccctgaaaaattcagcaagggattattgttagattcacttagtattacgccagttacagaagatatcgttacacttgcagcttctgcagctaatgatattttatctgatgaggacaaagaaactattgatatggtgattgtcgctacagaatcaagtatcgatcagagtaaggcggcttctgtctatgtacatcaacttttagagattcaacctttcgcaaggtcattcgagatgaaagaagcatgctatagcgcaactgctgctcttgattacgctaaattacatgtagaaaaacatccagattctaaagtattagtgatagcttcagatattgctaaatatggcattaaatctactggagaatccactcaaggtgcaggcagtatcgctatgcttattagtcaaaatccatccattctagagctaaaagaggaccatctagcgcaaacccgtgatattatggacttttggcgaccaaattattctgatgttccttatgttaatggcatgttttcaacaaaacaatatctagatatgctaaaaactacttggaaagtatatcaaaaacgttttaatactagtctaagtgactatgctgctttttgtttccatattccttttccaaaattagctttaaagggctttaataaaattctagataataacttagatgaacaaaagaaagctgaactacaagaaaattttgagcactctattacctatagtaagaaaattggaaattgctatactggctcattgtatctaggacttctatcgttactagaaaatagtcaaaatttaaaagcaggtgatcaaattgccttcttttcatacggtagcggagctgttgctgaaatttttaccggtcagttagtagacggctaccaaaataaacttcagagcgatcgtatggatcaactcaataaacgtcaaaaaattacagtaactgagtatgagaaactcttctttgaaaaaacaatcctagacgaaaatggaaatgctaacttcaacacctaccggactggcactttttctctagactctatttgcgaacatcaacgtatctacaagaaaattaataattaatatgacaaaaatttcctggacaggattttcaaaaaaatcccctgaagaacgtattcattaccttgaagaacaagattttttagctgattcttccctagaaatagtgacgaatcaggacttactctctttatcactagccaatcaaatggctgaaaatgtcatcggtcgaatagccttaccattttcacttgtcccagatgttttggttaacggtaaagtctatcaagtcccatatgtcactgaagaaccgtcagttgttgctgctgcaagttttgctgctaaaattataaaacgatctggtggttttctgacaaccgtccataatcgtaaaatgattggacaagtagccctttatgatgtacaagatagtcaacacactaaagaatctatattaaatcaaaaacagcaattattagaaatagccaacgctgctcatccatcaatagtcaagcgtggaggcggtgcttgcgacctaactattgagattaaagaagactttttgattgtttaccttatggttgatacaaaagaagccatgggtgctaatatggttaacaccatgatggaagcattatcttcgccattagaagacatttcaaaaggcaaaagcttaatgtcaattttatctaactatgctaccgaatctttagtgactgctacatgccgagttgatttaagatttctaagtcgccaaaaagaggaggccatcaagttagctcaaaaaatgacgatggcaagtcaattagctcaagtagacccttatcgtgctagcacacataataaaggtatttttaatggcattgatgctatcgtcttagctactggaaatgattggcgagctattgaagctggagcgcatacctatgctgtcaaagatgggcaatatcgaggattatctagatggtcttataaggttgatgataattgcctagaaggtactctgacgctaccgatgcctgttgcaacaaaaggtggatccattggtattaaccctagtgtccacctagctcacgatctactaggtcgtcctaatgctaaagagttggcaagtattattctttcgattggactagctcaaaattttgcggctcttaaggcattggttagcacaggaattcaagctggtcacatgaaacttcaagcaaagtcgttggcactacttgctggagctaaagaagaacaaatttcagaagtcgttaaacagcttctagactctaaacacatgaatctagagacagcacaaaaaattgtcaataaacttactaaaagtaaaaaaagaatttgagaaaaatcatctcaaattctttttttacttgacttgaatttccataagtgtataatctagttataaagactagattatatggagttttaaaatgaataaaaatcaatacccaaaatgggaagaattacctgaactagatttgtatcttgaccaagtacttctctatgtgaatcaattaattaatcctaaaacaataactaacgataaactactcaccgcttcgatgatcaacaattatgtcaaacataattatatatccaaacctataaaaaaaaaatacaatcgccgtcaagtagcacgattgattgttattacagcttttaaacaagtttttgctattcaagaaatcagtcaaacattagaacttctgacagctgacaatcattctgaagaagcatataacggatttgctgcttgtatgaacaaagaagaggttcacgatttaccaccagttgtcattagtgcctgtcagacgttgaacctttatcaagaaacacaaaaattagttttagaactaggaggaaaaaataaaaatgcttaaagaaatgtctatcaaattaagtcctcaactttcctttggcgaagagcttgcaaatagtatcactcacgctgtaggagctttgcttatgctaatcctattaccaatcaccgctgtctatagtcacaaccacttcggattacaagcagcacttggtacctcaatattcgtcacttctttatttttgatgtttttatcatcaagtatttaccactccatgacttataacagtcttcaaaaatatgttctacgcatgattgatcactctatgatttatattgctattgcaggtagttatactcctgtcgcattgtcacttattggcggctggttaggatatctcatcatttttttacaatgggggattacattatttggtatcctttataaaatcttcgctcccaaaatcaatgataaatttagccttgtactttacctcattatgggatggctggttatctttattttccctgctattatcacaaaaactggaccagctttttggggattactcttggctggtggtatttgctatactatcggtgcactcttttatgctcgcaaacgtccttatgatcacatgatttggcacctttttattctattagcttctattttacaatacattggaattgtctacttcatgctataaaatttaactacattttattgattatttttttgctaaaccatgatataataataatcatctaaatcttagagagaaggcgtggacatatgaaaagtgcttatatcttttttaatccaaaatctggtaaagatgaacaagcattggcaaaagaagtaaaatcttatttaatagaacatgattttcaagacgattatgttcgtattattacaccttcatctgttgaggaagctgtcgccttagcaaaaaaagcatctgaagaccatatcgacttggttattcctttagggggagatggcactattaataaaatctgtggtggtgtctacgctggtggtgcttatcctactatcggactagtacctgccgggaccgtcaataacttttcaaaagctttgaacatcccgcaagagaggaatctcgctcttgaaaaccttctaaacggtcatgtaaagtccgtagatatctgtaaagttaatgacgattacatgattagcagtttaacacttggtctccttgctgatattgctgctaatgtcacttctgaaatgaagcgtaaattaggcccttttgctttcttaggtgatgcctaccgtatattaaagcgtaatcgatcatattctatcactcttgcttacgataataatgtacggtctttacgcacgcggttactccttattaccatgaccaattcgattgccggtatgccagccttctctccagaagcaacaattgatgatggactttttagagtctacactatggaacatattcacttcttcaaattattgttgcatctaagacaatttcgtaagggagattttagtcaagcaaaggagataaaacattttcataccaataatctgactatttcaacttttaaacgtaaaaaatcagctatccctaaagttcgtattgatggcgatccaggtgaccaattacctgtaaaagttgaagtcatccctaaagccttaaagtttatcattcctaactcattaccataatataaaaggacctagacataagtattagagtaaatactatctgtctaggttcttttttgttatacttaaagcaataaatatcattgaaaggaagtatacgatgacaacatttactgctaaatttattgaccaagagtgggaagtcccagtagaatcaggtcgctaccatatgattgttggggaattttgtccttatgcacaacgtccgcagattgcgcgccaactgcttggtttggataaacatatttctatcagttttgtggatgatgttccaagtgatataggacttatttttagccaaccagaacaggttactggtgctaagtcgcttcgtgatatttatcatttgactgacccgacctaccaaggtccttatactatcccaattttaattgacaagaccgataatcgtattgtctgtaaggaatctgcagatttgcttcgactttttactacagatttctctgatttgcatcaagaggatgctcctgtccttttcagccaagaaactgcttcacttattgataatgacattaaagacattaataagaacttccaaagcttaatgtataagttagcttttcttgataaacaagcagattatgatacttatagtaaggaattcttcacttttctagatcaaaaagaacacttactaggacaacgtcctttcttgctcggagataatctaagtgaggttgatattcatttctttacaccattagtccgatgggatattgctgggcgtgatcttctactacttaatcagaaagcgctagaagactacccaaatattttttcttgggctaaaactttatacaatgactttaatttaaaaacattaaccaatccacaatccataaaaaataactattacttaggcaaatttggaagagctgttcgtcatcataccatcgtcccaacaggtccaaatatggcaaaatgggaaaaataaagctaaaaagctaaggcaattcacagccttagctttttagctatactagtccaaagtggaccaatcaaattcaataaaagtcttgaagagatctccataagtaccactgtaagcaatatctttatctttataagtcattttcgtaataggataattgtcaggaacagtaacacatcccattaaaactcgaataaaatcatttggattttcaaaaacttggcatcgttcagtgtcgtaagcatctttataatacagtttaatcatcttattacctctgacgttttacaaggaaactttgacaggaagctatatctacttcacaaaaataatatcatttagcattggcttccttcaattgaccatacaatatataattgacttgtcgtaaatcagttatttttttacaattcagtgcacacattatcattcttaaatcttctttccaagaattgagaattgcaataacatcatctacaggataacgctcaactaattctaaaactgttctagaaagtccaacagctttagcacccaacactaaacattttaccatatctaaaggatgacgaatgccaccagatgctaggatatccattttgtccatcatagattgagcgtttattaaggattgagctgttgtttgcccccaggtattgagatacgaacggtcgcgtccacgttgattttcgatgtaagcaaaactagtccccccacgccccgaaatatctacagttgtgatacctatatcgtaagcatcctttattgattgtaaatccatcccaaaaccaacctcttttaaaataagtgggcattggatattgtcgacgtattcttttaagtgagaacgccacatgtgaaattcacgctctccttcaggcatcaaaagttcttgcatcacattaacatgaacttgtaaaaaaatggggttcatagccttaacggttgactctgctgctggtacaggcttgtctaaccctatatttgtcgccagttttaaatcaggatacaagtctgttgttgggtaggaatcatcttcatcgtttttgagagctgccgaatatgaacctgtcaccataacaatccctgtagcttgagcaacctgtgccaatttatgattgactgctttccctttttcactaccgcctgtcatagcattgatataaaaaggaaattcaaagctttgaccagcaaaatgtgttgataaatcgatatcgttgacattatattttggtaaggatgaatgtattaactcaatatcgtcaaaactattataatgcgactgatatttaagagcatattttatgtgatcatcttttcgatttgtcatgacagtgtctccttactaagtagttcaataccagcactctcccaacgcttgattagagtttgattatcatttttattaaaggatatggctataccacaatcgcctcctccagatcctgaagattttgtgactatatctaggcctttgcttgcctctttaagcttttgaagtttatcggtgtaaatagatggatgaagattaaataatagcaagctaatttcttctaaacatctcttaatcgcttctttatctccttctttaaaggctgaaagtaactggacaacttgatactttgtatcatctaaaaaacgctgcgtaatagttgatttaactatatttatcatttcttttgaaatggacggttgcattgtccatcccactaaaaaatccatctccaataaagcttgtattttggtaatacgataaccccattcagcttccaatacttgttccaaaggttttgtttcaatcatttttgaaacagccctacgatcaaaagctgaataagaaattaaatgctcataagcaatacaagcaatatctcccattgagccattatcacctctttttaagagaacataggcagataatttaaaaagcaagtcgcttggcatctctatctcataaagcgcagccatagctttaatagtcaaaacgacaacacttccgctagagcctataccaaatttaagtccatagcgctctaattttcccgtaatttcgaggtgaatcggttttatatttttgccaaaattaatcaaccattcttccataagcaatatcgtttcctgaatgagactatattgcttatctggctgtaagcttgccgtatagttaaacatatcagaataaaggctgtagttatctgcaaaagtagctaatgcagtcatataaataggaacgttctttaaaatagctacttgcccaggatacagtatcgcgtattcacctgcaatatataatttgccacctgtttgcaccttaaccatctgctaattcctttgtcgttgaaacaataatacgataatctttctccaagatagcagctaatgcctcaaggtcttgacgtaagcaaagtactttaacatttggacccgcatccatcgtataataacattcatgacctttttcgcgaagtttcttcacaacatccatagctttatatgtctcttctgtcaaatatgaaaaggctggagttgctgttttagttgttgagtgcattgcaagtgcattacgctctgtcagttgacctaccttttgaaaatcattattttttaggtatactaacatatcttgataatcttgttcagattgccttacccattcattaaaagtagttgaagtttcggtgcagattttcataccttcacggcttgaaatcggctttcttttgtcatttaagaccagcataatcatagctaaatctaaattagtgtgaactttatagatatcaccactatctttatcccaagcagcaacaggtccaaaaaaagagcgtgaagaggagcctgaagcaaacttggcttcttgagctagctgtgattggctaaggttagtaccaaaaaaatcattgcaggcctttactaaggctgataaaccacttgatgacgatgataagcctgcagctgttggcatattattagttgtttcaatctttacaaagccggacctattttgtcgaaagcgatccaagatagctgacattttgtcatgttcatgatcattttgaagaacaccagagatgtaaaattcatctttcttagcatccttcccaagggcagtcaaacgtgtttcagtgtacatgttttcaagtgttagagaaatactactggtagctggaatcattttttcagcatctgcttttccccaatatttgataatagcaatgttagcataagacttaacacttatactttttccgtccatgtgttgacagctccttctctttctaattgctgacttaagcgctcagcttctcttttttcttttacaagtgcgataatacaaccacctaatccgccgccactcattttagcgcctagagcaccacaactaatagctacctctaccagatgatcagcttctaaacttgagacacccaattgttttaaactttgatgtgctttagtcatcaagctaccaagttgtttggaatcacttttatgaatagcatcctctgatgcctctgctaaataacctaattcttttaaaaagggtagtactgcctcgccagatgatttcaccttatccactgcttctttagtatgcccatgaattcctgtatcagcaataactaaataagcattcaaatgcatgggtactgttgaaaaaccaatattgcggataaatttaatagtattttcactaagacaagtttttgcatctaatccactcggatttgaatgtgctatcatttctgctcgattaacaaggcattctaacaaatctgcctccaaatcttcatcaaaataatcaaaaactgcacgaatagctgcaatagcaactgcagctgatgatcccataccacgtctttctgggacttgtgactcaatatgatatgcaattttagaagaagttttacctaaatagtccaaggcagcaaaaatggctgtcgacaaaggatcagtcatatctaatgctattaattgaggagcctcttcaataaggcaagttacttcaatattttttaaaggaatagcaatggctggataaccatatactactgagtgctcacccatcaagataatcttgctatgagcctttcctataccaaacttttctttcatctttttctctttacaattctattaccttactattttaatataaatccttaaaaaaagcgactttaacgtgataataacataaattaaaggaactacaattgcagtccctttaatcttaaatgtaaatgacaaaggtaatggtatcatgtttataattcacatcgatacttcctttaaatagatgcaccaaactagttacgatagaaagaccaataccatatcccgattttttgttattatgtgactcatcctctcgataaaatcgttcaaaaaacttgctatagtctatgtctttaccattcttataagtatttgaaacttcaagcttagctcgtctcaaacgacttgaacgtgataacttaactgtcacagtccccataggatcacaatacttattagcattatcaaccaataatgtaaccaattcaaataatgatttttcttcagctttgacatgaatacctggttggatactcattataaagtctttaccatctttaatgattggacctttaaaatcttctgcagcatcttttgtaatatgtgaaaagtctaagtcaaccatacttatatcaggctgttcttcaaagcgggcaagactgaccatgccattaattagacccgttaaacgttggatttgatcatttgtagatttagtccactctgattcaccactcatcatttccaccaattcattattagcggagatgatagcaagtggagtttttagttcatgtcctgcattggtaataaaacgcctttgcttttcatagttagcaacaaatggtaagataactctccctgataaaactgaaacaattaccatgaagacgataaaacttaccaaggacatccatattgaaagttgcaataatctttgattatcaagatattggttggttgtatctaaaaataccactaaataatcatttttaccaaccttttttagtagataagaataagtactaaaattataggtgatatgacctgaatgactattttgtgatacgatacgcttggcataattttttatttgcctatcgcttacttcaaagatatttctagaatcaaaactagtcacgttaccttttgcatctgttcgcgcactgaaataacggaattggaaaatagcgtccgttgataggtcatcacctaattctttactaaattcaagtttattcggtatacgtccattgttgtctgcaaggatagttaacacacgataaatttcattcttcgtttgatagtgattagcagagttgaggacaccgactactgaaaataagacaacaagaatagctagcgcagctattccgataaaacgaagtcgtaaatttctaaacattagccaccatttatttcacttaatttatagctactaccttcttgaccaataatctccaagttagcaccaattgcctgcaatttttgtctcaaataagaaacatagataaagacgtatccctcatctacatcttcttggtccttatctgctccccagacatgttcgaaaagttgttgtgtagataattctttatcatggttcaacatgaaaaatgctaacattttagcttctttacccgctagacgaatagtgttttcacattgcaactcttgttcaccgactgataaggttactcttcccaatgacaatacattaggtgtgaaatcttccaatcttcgggacatagagcgaagccttgctaataattcttttagagagaagggttttgttaaataatcatctgcaccagcatctagacctgttactctatcatcaatttctgccatggctgttagcataataatgtgagatttatttcctgattgtctaatttctttgacagcctcaatacctgttttaacaggcatcatgacatccataaccatgacatcatatgcattttgattagctaaatcaatagcagtctgaccatcgtaggcgacatcaacaacataaccttggtgactaattgccgtactaaggacacgtgacatctgttcttcatcttctgcaattaatactctcattttattccttctttgttccactctctatcaattgacgaatcgtttgcatcgttaaatcaacggatgccatttcatcagcacaacgttttaattcccttacaattcgttcgggattttcaatatcatgcttgtatttcatttgatgttctaaactagcccaagaatcttgcgcaatggtacgcaactgaatttcaatgtaatatttaccgtctgaattacccaaacagtctggatagggggtatcaatttctaaaatcacatgataagaacgatacccatttggcttaacatgctggatataatctttttcaaccacaatacgacaatcatcgaatgccttaatacgttctataatttgataaatgtcgttaacaaaaccgcaaataatacggactccaatgctatctctaatcgtttttagtgcagaatctaccgttacaggtaactgtttgcgacgacatttctctatcatactatctgacgttttaatacgaccaatgatatgttcgtacaatttatagcctgtttcaaccttagctttatcattttctaattggatacgctggctgaaatcttctaaaattaatggtagatatcgaccataatctccataaatatttgtttccataagaaaccttcctattctctcttagcctccattatatcatagaaacttaaggcaaactaaaaagatggtaggtactgtgagactatttatacaaataattgttacttaaggatcttaccacaataatttgtaaaatttattgagtttgtcaagcaaaggcagttataaagttaagataattagtaattattttttcaaattctttttgtgattgataatctaaaacgacatgagaactactagaattatgatctgtttcaatgtatataaaaatttcaaattgagactgctcaataaatatggtatcggcatcattgataaactttctttttaatgtcttataataaaattccataaaatatatcctatgaatttccttttagtttcacactagcaaggggtttctctcctaaatatatctcggaatcatatttcagtatattaagagtctttaacggtataggctattaacctttctttgaaattttcttgatgataagtctaattgaaattatccattaccaacttgtcctgtattcgatttccatcccctagccaacaatcttttagttataaacttctaataacacctaataaataaagagtacttacttttatcgaaatatagaacaagactctctttgctaggttttatttttatatattttgaagatagtctgtactttatataggtataaaaaccgggataggaaatttggtgcatttaacataggtatattcagtttagcattatcttccttttaattagagcgttaagccctctaataatattttattccctttttaaaatgataaattgcaaaaaaagccatcaaatgatgactttttatgtagactcgcaagacgctcctctttagatatagctataattaactcattacaatccaaacacaccataacaaatagttcatcaaaatctatgatgtgattattaacaaaagaatcttataataacggtattggatcacatcgagtcagaagaattttaatttttacgtcgttttaaactgctagctgccaaagtagctgttgttgctactagagtaatcccaacaactccgagagttctattactttcctcgcctgtagttggaagaacagatttattggttggttttttagatgaagttaatactcctttgttaggtctattttctgtagtttgggtagatataaacttaggagactctgattcgcttggaatagaaattcccatttcctttggtagggtagattttactgattctcgatacacataagtcacttctgttgtgccttcagtgacctttccgaattcatttcccatagtttttgcagaaacgagtttataaatcttaccattaaatttaatttcagcgaatttataatctgtggtatcatatggtgtcccaacctttgattcgtgtgtatctagtattggttttttgataacattacctgtttcgtccacatagttaatcactacattccctacagcctctgattcatctttcttaagcttatattcatatgtaatggtctgatcttgttcagtcaccttaccatctgctggagcatcgcccttattatcacgcacatgtacaaattcatacaacttaccatctttttcaagagttgcaggtgctctatctgaatatgcttcatcaattggagcttctgatttaactgttttaacacttgcaagctcagtctctgtccctaaaataacatagcgggcatgaacatttccaactttaacgcttggaacctctaccactttacgatattgatagacaacatgttgttccccttctcgaagtgttcctttctccgctgctgatccctcttgaattgaaactagttcatattttattccatctttgtcaagtaacaatggtttctcagaatcattctcagctgtattataaggagtagcttggccttctttatcacgaatataagctgttggggtatcgacataggtatctttaagttttgtagcagtaccctcgataacataatctacaaccacacgacccttaggaacttcaacatattcatatgtaatggtctgatcttgttcagtcaccttaccatctgctggagcatcgcccttattatcacgcacatgtacaaattcatacaacttaccatctttttcaagagttgcaggtgctctatctgaatatgcttcatcaattggagcttctgatttaactgttttaacacttgcaagctcagtctctgtccctaaaataacatagcgggcatgaacattgccctttgattcttgtttaatgctataaacataagttactgacttagtaccttctgcaacttctccagatgctgcatcagtaccataattaaatgagcctccatttgtagccaacgtaccatccgaattaaccttaccaactggtactgtaatattttctgctactaattcatacaccttaccatctttagtaatagtgaaaggacgctcaactgtcgcgtctgaactaaggtctcctgatgattctgccgtattgtaatgtgttcctagaattgcatcggtggtatctttgtattcagtaccaataatattgccttctgtatcaatataatttacaacaactgatccacgcggattttgtaagcgaacagataaacgaagtaagtcatcgttcgaaatatcattattatcggaaattttatcatcaataacatcgcttgcgtgcttatttaaaccattaatactatctggtttaactacagttggtcgaatattcgcagtactattataatatccatctcctgtatgatatttctctttagaaaatgctgtaaatggaacagcttgatgatataatttaaatgaaacctctgtaaaggttccttttaaacgaattgaacctgttcccgctgggactgcatcaggcgttctatctagaccattgacaaagtctgcgtcagatggattaacaactgactcattaaaggtgtttttgtctgttacatcaaccgtattcgctgtaactgttaaattaactcctgaacttgctttttcaaggcttatacctggagttattaactcaaagaacgttgaattatatgaaccacgtgcatagtcaattttttcaacaatcctaccattttcattggtagtttctgtaaatgatagatgtgcattacctccaacaccagataagtcaataatagggtctgtaactgccttgtcaaatttcaatgttaaaatagttgatggcgccttcccattaaaattgagcttatcagatagtttactacctccttcagtacgtcctggttgtgtatagacacctaaagcaggtatttttgcaggatctacatttccaacaaacatttctgatgttgctttatattctgactgattaccaccatttgttaaaacaccagaaccttcatcattccctggtacaggagtaattgtcgcagtcactttgacggttgagttatcgtcacgaaccaccgttgtttcagcacttttaaatgattcatcacgaacacttggagaaatatttttatttcgaacactgtcagcatatggattttgtaacgtccaatcgccactagtagcatacgtcctcttgtctactgatggggctacattatcagttgttggtgatgttgctgctaaagttgcaggcttaatgatttctgaagtattactcaaattacttccttgagtgctagttgcactcctattagtggaagtaggagttgaattgttagaagtgaccaagtttgcatctgtggccgttacacctgttggagttgttgcagatgtaacactagttgtctcatctgcaagtacctgaggagaaatgaataataatgatcctatagcaactgaagctactccaaccgaaaatttacgaatggaaaactttaaacctttttcaaaattatatttacgaaacataatatcaacctccctgtaacagtttttatatttcacataatgaatagcaaaaaattaaaacgctgtcaattagaaaggtaaagatttttgaaaattaccctaatttaaaaatattttgactttacataaaactaaagaggagtcttattcaagataaattgaaaaatagatactaagacctggtagtttacataaaacagattcgatacttctatccaatataaagataattaaggagacttttaactaaaaagtgtctctgaaagctatttacaattgattatattatcacaagtctattaagcaggtttaaaatcatattatcagacactataaaaactatctggtgtagctgattgtattaaaatatttagtatatctatttaccttgctcattgtccaaatgggaggttcatctcaaagtattacagtataacaagttaaactgtagcttaaaaatttcctaaaatttctttacaatatcatcctcatcaatcatgttgctctttaacactaaaactacttaaacacaggaatttccaaaagaacaaaacagttaaagtgactaatcgtttagttcttttagattgaagttgaaatggtaaacgagaactatcggctatatttaaaaatgattctctagataacttacctttattaaatattgttaaactagcaatcctgtagaagtaattcttaccaattctctcttcatgtctttaataaaatcacagcattaagtcatcaccctaagatagttaatcaagattttccattgccatatttttagctaatgtcctaataacctttttggtggtacgaatctcttctttagtaatacctgctaacatagtactatgcaatttttctaagaaaatttcaaattgtgtagccttttttttacctaagtgagtcaaataaagatattttacacgcttatctgtcttagatggtacaatcgcaataaaaccatttttttccatccgttttaccaaattagaagctacagacttagaaatgtgtaagatttcttcaacagcttttatagacatatccttatcaggatgtttatagagatacatcactaggtgtccttgtggacccgctaaatgttcaacatcatattcttttgcataatgatctaaatacttttcaagttgattaacaagtattcgtgctttttgaagaggattctccataatcatactcctttaatagttaccgtgagaactattttaaaacaacctttattaattgtcaattaaaacttatcgtaagaactactcctacattaaaatttctaatatatatatatatatcattcgttaaataaaaaattatttcgcttactatccaagattaaaaatatatgttcgtttttttatatcttaaattataaatttatattgatttttaatttaaatgttagtaaaatacaaatgtaatatttatttaatttacaggagatttaaatgaaaaagaaaattattttgaaaagtagtgttcttggtttagtcgctgggacttctattatgttctcaagcgtgttcgcggaccaagtcggtgtccaagttataggcgtcaatgactttcatggtgcacttgacaatactggaacagcaaatatgcctgatggaaaagttgctaatgctggtactgctgctcaattagatgcttatatggatgacgctcaaaaagatttcaaacaaactaaccctaatggtgaaagcattagggttcaagcaggcgatatggttggagcaagtccagccaactctgggcttcttcaagatgaaccaactgtcaaaaattttaatgcaatgaatgttgagtatggcacattgggtaaccatgaatttgatgaagggttggcagaatataatcgtatcgttactggtaaagcccctgctccagattctaatattaataatattacgaaatcatacccacatgaagctgcaaaacaagaaattgtagtggcaaatgttattgataaagttaacaaacaaattccttacaattggaagccttacgctattaaaaatattcctgtaaataacaaaagtgtgaacgttggctttatcgggattgtcaccaaagacatcccaaaccttgtcttacgtaaaaattatgaacaatatgaatttttagatgaagctgaaacaatcgttaaatacgccaaagaattacaagctaaaaatgtcaaagctattgtagttctcgcacatgtacctgcaacaagtaaaaatgatattgctgaaggtgaagcagcagaaatgatgaaaaaagtcaatcaactcttccctgaaaatagcgtagatattgtctttgctggacacaatcatcaatatacaaatggtcttgttggtaaaactcgtattgtacaagcgctctctcaaggaaaagcctatgctgatgtacgtggtgtcttagatactgatacacaagatttcattgagaccccttcagctaaagtaattgcagttgctcctggtaaaaaaacaggtagtgccgatattcaagccattgttgaccaagctaatactatcgttaaacaagtaacagaagctaaaattggtactgccgaggtaagtgtcatgattacgcgttctgttgatcaagataatgttagtccggtaggcagcctcatcacagaggctcaactagcaattgctcgaaaaagctggccagatatcgattttgccatgacaaataatggtggcattcgtgctgacttactcatcaaaccagatggaacaatcacctggggagctgcacaagcagttcaaccttttggtaatatcttacaagtcgtcgaaattactggtagagatctttataaagcactcaacgaacaatacgaccaaaaacaaaatttcttccttcaaatagctggtctgcgatacacttacacagataataaagagggcggggaagaaacaccatttaaagttgtaaaagcttataaatcaaatggtgaggaaatcaatcctgatgcaaaatacaaattagttatcaatgactttttattcggtggtggtgatggctttgcaagcttcagaaatgccaaacttctaggagccattaaccccgatacagaggtatttatggcctatatcactgatttagaaaaagctggtaaaaaagtgagcgttccaaataataaacctaaaatctatgtcactatgaagatggttaatgaaactattacacaaaatgatggtacacatagcattattaagaaactttatttagatcgacaaggaaatattgtagcacaagagattgtatcagacactttaaaccaaacaaaatcaaaatctacaaaaatcaaccctgtaactacaattcacaaaaaacaattacaccaatttacagctattaaccctatgagaaattatggcaaaccatcaaactccactactgtaaaatcaaaacaattaccaaaaacaaactctgaatatggacaatcattccttatgtctgtctttggtgttggacttataggaattgctttaaatacaaagaaaaaacatatgaaataataaaaataggtttggataaaatatccaaacctatttttatattaatatgccttccaaatgatctaactcgtgttgacaaatttgagctggaaaatctgtcaacttgatttgctgttccttccaattgatatcacgataagaaatcgtaatgtgacaatatcgttgtgtacttctgcaacctacgagagaaaggcaagattcttctgtctcatatggatccgattttgcaactactacagggttaaacattactaaatttgtaatacccacattgatgataatgacacgcttcagactaccaatcatatttgctgccatacctacacaataattttgattagcatgcaaagtctcctgtaaatcttttgctaagctcacatctgctctactagccatttgtgatttttgttgtaaaaagaaagtatctctaacaattggttttatcatttattttaacctaactctattatgataatactagtataccataggttagctaaggactatgataagagattaaacaataccttgtgcagacatagcttgagcaacttttaaaaagcctgcaatgttagcacctagaaccaggttaccactatcgccaaattcatcagccgcttcggaagcattcacaaaaatagttttcataatacgttgcaattcttgatcaacttcttcaaaagtccatgccctacgactagaattttgtgccatttcaagcgctgaaacagctactccccctgcattggcagctttagcaggaccaaaagcaacccctgccttttggaaaactttaatagcacccaaggtagatggcatatttgctccttctgttactgccaagacaccattttcaactaataacttagcgtcttcttcgtctaattcgttttgagtagcacacgggaaagctaaatcagctttaatagaccagatactaccttgatctgctggtgtgaaattagcttttggatgtttctccgtatatttaacaatacgtgctctttcaacctcttttatctgtttcaatgtttcaaggtcaataccgtctggatcataaacataacctgaagaatctgatacagctacaacagttgcacccaactcttgtaatttttcagtagcataaatagccacgttaccagatcccgaaaccagtgcaactttgccagttaaatcttgaccacgcgctgctagcatttctttagcaaaatagactgccccataaccagttgcttctgtacgagccaaagagccaccataagtcagtccttttccggttaaaaccccattttgataaccatttaaacgcttatattgaccataaagataaccaatttcacgtccacctactccaatatcgccagctggcacatctaaatctggtccaatgtatttttgaagttcagtcataaaactttgtgtgaaacgcatcacttcattatctgatttcccttttggatcaaagtttgaccctcctttgccaccaccaattggtagacctgtcagtgaattcttaaaaatttgttcaaatcctaaaaatttgacaatagattgtgttactgtagggtgaaaacgtaaaccacctttataaggaccaatagctgatgaaaattgtacacgatatcctcggttaacttgaacctggcctttatcatctacccatggaactctaaaagaaatcacgcgctcaggctcaaccaaacgttctaaaagattttcttcaatgtactgagggtatttatcaaaaactggtactagtgactcaaaaacctcttcaaccgcttgtagaaattcttcctcatgctcattttgcttcttcactttctctaaaacacttgctacatatgtctttccgcttgtcatttattttcctccgtattgttttaatatagttagcattataaattgtcagaattttcttgtcaactatttgctatggtatcattattaggagcaattttaaaggtaattatttgacttttactgactttcgttctataatgagacaaatatttgattggagtatctatatgaaatggttcccacttgttggaggtataattgccttattagctggcttctatctctttataaatcctgtaacggttgttgcaactctgggttggttcattgctttatttatctttatttatggcatttcaaatttagtacgctacttgcaagctgattcttatcaccgtagcccttggtatctggttcagagtatccttgctattatttttggtatcattttactatccagctcagcaatgtcactttcaaatactgtcatgactattttagcatactggctactggtatctggtattttacgacttttgggtggtttccaaatgcaaaaaattaatttcccaggtgccaaatcctataaacgttcggcttatattgcactcattttaggtattattttactggttcaacctaccttatcagcagccatcattggaagatttgtagcctttatattaatagcaattggagcttcggctatttacacttttactcgtattaattattaaaaggacatgtttcgtgtcctttttttatctattgatgacgtcatttactatttgaaaattggctattatataattcgtaataaaatcctttatctgctaggagtttctggtgattaccttgttcgatgatttgaccatcctttagaactaaaatgttgtctgcctcttgaatcgttgatagacggtgtgcaatgacaaaactagttcttccttccatcaattttttcatagctttttgaataagcaattccaaccttgtatcaacagatgaagtcgcttcatctaaaattaaaattttaggatctgctaataaagcacgtgcaatagtcaacagttgcttttgtcctaaggagatattgcttgattcttgattcatcaccatattgtagccaccaggtaacgttcgaataaagtggtcaacattcgcagctttggcagcagcaactatatcctcatcactggcttcaagattaccgaatctaagattttcttttattgtaccttcatataaccaagcatcttgcaacaccatgccaaattgttgccggaaatcttggcgtgataggtgtctaatatcgtgaccatctacggtgatagcaccttcactaacatcgtagaatctcatgagtaagtttataagtgttgtcttacctgcacctgttggccctacaattgcaatcatttgccctggttctacatctaagttaaagtcgcggataagtggcttatccggagaatagtgaaaatcgacaccatgaaagctgacttgaccggttaagtcatggctcaatttttcagtgacttgattggcttcctcttcttcatctaagacttcaaaaatacgttctaaggaagattttgcactttgcaaaacacctgctaattgtgtaatggtttgaacgggttgactaatttgccaaacatactgcacaaatgcctgcatgttaccaattgttaaggtaccagcaataacttgtaaaccgccaacaaatgcaatgataagataaataaaatcagagatactattcaatactggcatcataattcctgaaatgaagctagctttgaaacctacatgacgtagattatccgttatatcacgaaattcttgactagacgcctcttctctaccatataattttatgatattgaaaccagttaatttctcttgtacaaaaccattcagttctcccagaatctttgcctgttctttaaagtaaggttgggatctttttagtatcgcttgtgcactaaaataagttacaggaatacaagcaatgataatcatggctaatggtacatttagataaagtaccataacgactactagaataatacttaaaaaagcattgataatctgtaaaaagctctgttgtaaagcatttgagaccgtttcaacatcacttgtaaaacgtcccaacatatctccaaattggtgcttatcaaaatacgatacaggaactttattgattttacgattcaaatcatgacggatatcacggatacttttttgaacgacagtagtcataaaataatttgagccataagaacctaattcatagaaaacacctctgaaaaaataaataatcagaataccagcaatataaggaacgttcaattctgccccagaaactcccttagccatatcaacaaggttagcagtcaactctgttatcgctaaccctaaaataaaaggctccagaatactcataaaactagataaaactttcaaaaaaatcgctaagaaaagagtagctttgtagcgagttaggtaagaccataatctcaaaaaaatagatttttttctcatacaatcactctccttctgataagttttggttcttcagttgtgactcagcgatttcacgataaatagcattattttctattaattgagcgtgggtaccacgaccgacaatttcgccttcatcaaggacaataatctgatcagcatccataatcgtacccaccctttgagcaactatcaaaaccgtagaatcaccggttacttcttttagacgcgctcttaaagtagcgtctgtcttataatcgagagcagaaaatgaatcatcaaaaatatataaatctggatctttaacaacagccctagcaatggataaccgttgtttttgacccccagaaagattgctcccaccttcagctaaatgcgtttcaaaggcttcttggtgactctcaataaactctttagcttgagaaatatcaaccgcttgtctaagatcatcaatagtagcatcagcttttccatattttaaattctctcctattgtccctgtaaataaaagagctttttgggggataaatccaatcttttggcgaagtgatttaaggttataatctcttacatcaactccatctactaagatttttccaagtgtcacatcataaaaacgtggaatcaaattaacaagagaagattttcctgaacctgttgaaccaataaaagcaattgtttctccaggcttagctttaaaagaaatatcatgcaaaacgggactctctgtttctcctggataagcgaatgttacattatcaaattctaaatgccctttaagtttcgtatccgtaacaccttcggtattaggattaatagaaatcggcatatccattacctctctaatacgatggctagataccaccatacgaggatacatagtaaaaagattggcaaatagcaaaaatgaaaagagagcatggaagctatattcgataaaagcaactaaatcccctattttaatagcacctctttgtaagggatccaaagcaaaccaaacgatagccacaatcattgcaataataatttgaacgaaaagtggttctgttagccctgttaatttaaaaagaccagttgaagtatctgtgtaacgttggttagcgacttgaaatttttgtgattgaaaattctctcttgcaaaggccctaacaacgcgtaaccctgttaaattttcacgaacatattgattgattttatcaagcatagtctgttgtctttcagataaaggttttgtttttatagctacatataaaataactcctaccaaaagaggcatcgcaaccgctacaagccaagctaaagatggactcgtaattagtatcataaccacgctaaaaatcattaccataggagttactaggcctaaacgtaaagacatttcagcaaattgcatcaaaacaaaagtatcgcttgtcatacgtgtcactagtgaagatacacctatctgttcatattcatgatgggagtattcttgaagcttagcatacatatcattacgcatatctctaatcattgttgtcgttaagcgactagatgcgtaagccatcgtaatacgcccaataatacctagtacaacaaatataaacatgatgaacgtccacagataaactccagtccgatcaccttttgtaacgccattatcaatcatacccgctaaggctgtgggcattcctaggataaccgtcacaaaaagcatagctcctagtaaatcaagccataaccaattggggtaccttttcaaataagaccaaatatatgccatatatgtctccttttctttcctcttatctcaaaataattaatccatgttcactaatccactttcaacttataaatctttaatcatccaaatatccatagctgtatgaccttgatcatttgctattggttgcgataaggcacaatatcccatatgcttataaaccgcagttgccctactcaaagtactggctgtctctaaataaagttgtctatacccaatttttcgagcttctacttcaatcattttcactaaatcagtagcaagccccttaccacggaaacgttctgcaatgtacaccttctgcatctctgcaattagatttttcagcggaccaaagccgccacagccaataatctcatctctctcctcaatgacaaagaatcctgacttctctattttttcgtagtatgaggtcaaatgatctaagtgagggtctgaatatgctgtatcaggtttatctaaatcataggcgcgtaaactttgtcgaattaattgtgcaactgcttggtcatcatttttaataatcggacggataatcatgtgtctaactcactaaggtactcataacggtcatacttttctagaagtgcttcattttttgcatctaattccttttgtaaatcagataaccttgtaaaatcactaccacatgtttgcatatcattttctatacgagtgatagtattttccaatatcataatatcgtcttcaattgtcgcccattcttgtttttcaaagtaagacattcttttacgactttgcttttcacgacttgtcttggtactctcttttttactgataacttcattattttgctcattaaatgctttttcatctaaataatcagtataattaccaaaaaattcacggatatcgttatcttcaaacgcaataattttattagccactttatctaaaaagtaacgatcgtgactaactgtaatcacaggaccaccaaagccttgtaaaaaattttcaagaacagttaatgtagcaatatctaagtcatttgtcggctcatcaagtagtaacacattaggcttttcaatcaggatttttaaaaggtaaagtctttttttctcaccacctgataattttgcaatttgtgttccatgtgtcgaacgtggaaagagaaattgttccaatagttctgtcacacttgttgtaccgacactagttttaacctcatctgcaacctcttgcaaataattaataacacgttttgagccatccatattatgaagttgttgtgaaaagtaacctacacgtatcgtttcaccaatagagacattacccgaatccggctgtaaatcttgaacaattaaattaagtaaggttgactttccaacaccattatctccaacgatgccaatacggtctttattttgaattaacaaattaaagtctttcaagatagatttatctgggtaagaaaaagagacattttcaaaattaataacctttttcccaattcgacttgtttcaaatgtcatttccaaatcgcttgtatcgcttgtttggtgtaaatcgttttttagattttgaaaacgattaatacgagcctgttgtttcgttgcacgagcttgtggctgagtacgcatccaagctagttcctgtttataaagctgtttctttttatgtaaactagcagcatcacgctcgtcttgttctgcacgaagtcggacataatcctgataattgccttgatattctgtaatctgtgccttatctaattcaaaaatacgtgttgcaacattgtctagaaaataacgatcatgagttataaaaagcactgtctttttactatttttcaaaaaattcgttaaccatgcaatagtgtcaatatctaagtggttagtaggttcgtctaagagcaataaatctgcatcatttaataatacttgcgctaattgaacacgtcttcgtaatcctcctgataattcaccaaccgacaactgcaaatcagtaatacctaatttggataatactgttttgacttcgctctcaatagaccaagcatctaaagaatccatttctgccattactttctctagacgtgattgcttactttcttcgtagtgattaagcaataattcatattctttaattaaagccatctctcttaagtcagaagaaagtacggtgtccaaaattgtctgagaatcatcaaagtctggttcttgttttaaataagcaatcttataatcattagctgatgaaaaaggggaacgatcaccatcaaaacctaattcacccgaaataacatctaatagtgttgtctttccagttccattgacaccaataatcccaatacggtctaaactatggatgataaatgaaacattactaaagaccgtcttatcaccaaccgacttagtcaatccatctactaaaaaatcgctcatataatcctctctaatccatcaagtactgcttaacaaaatgtaaaatagcctcttcttcattaatcagttgtcctaaaacaatggctaattcaatttgagagataatatctcccatctgtggaccaggttttattcctaatttcttgattaaggtgccaccattgacaactatctcatgcctatcatggattgctaactcactatctagttgttctattttttcgaaatcaaccatcaagcctcttgctttgcgaataccttccgcttgttttattatagtttttccataacgataaagatgttctttagtcaatcccatttgttcacgaatacgataaacatccactatatgctcaacatctttttgaaagtgagttgatgtcttccatttttttaaaaaagtctttgtgtgttcaacttccatactcaagatgagtgatgcccaagcttgttctgatgtctcaaataaaaaatctttatctaactgggacaaaaaggcgcttaattgtaattccctattttttaagcatggtagataattaaaagcatgactatctattagtgccagcattcctttacgccaataaggtgctaatagaagtttatcaaattcaataaaagaacgctcaacagatattttctccaataatgacgcgtgctttttcattgcctcaaaagttgttgtttcgatatcaaaatttagactagcagaaaaacgcaaaccacgcataattcgaagagcatcttcattaaaacgctcactggcgagtcctactgctctaagaaggtgattatctaaatcatccaatccatgaaagagatcaataacttctccatcttcatttaaagcaaaggcattaactgtgaaatctcgacgttttagatcttcttctagcgacctaacaaaattgacctgactcggacgcctataatcaacataaacctcctcagtcctaaaagtggtaatctcatattcaccacctttttccaatactaagactgttccatgttcaataccaacatcaactgtccttttaaaaatctgctttgtttcttctggataagatgacgttgctatatcaacatcatgaattggacggtcaagtaaaacatcccgaacactaccacctacaaagtatgcttcataaccggctttttttatcttttttaatattggtaaagccttctgaaactcagaaggcaaataatttaatctcatcatactattccaaatctaaacgaactaaagtcgcattattatttcttataaatggattcagaaacaaaaagaactgcctaagggacactccctacctactcaaattatcaaaaaagaatctcctaacttcttctttgatatctgcaataaggatcaacctccaagcaactctttttatcacacatcaatttttgggggtaataccaaaggcaaccgcaccttcaccaagatgagttgcaataacgccaccaaatgatacaatttctaaatcgtctttaagaccagctttagctaacaaattatataattgttctgccttatcttgtgctctagagtgaataatagcaatatcatattcaccatctgctgtcatttctttgacaatctcagccaagcgttttaaggcttttttctctgtacgcactttctcatagacaacgattttaccttcttcattaaaatgtaagaccggcttgatacttaaaaggttaccaatgatagctgaaccgtttgacaatctaccaccttttactagatgattcaaatcattaacaacaataaatccttcaattttttcaatttgtgattgtatcttgttaactatgacatcaaaatccatcccttcacgtgaacacatcaaagcatttctaactaaattgccctgtggtgctgaagttattttagtatccggaaaagcaattgtcaaatttggatgttcttcaataagaaactgaatattctgccagaaacctgatatccccgctgcaatgaataaaccaaggacgtgtgtatacccttctttctccaattgacataagagatcatctagttcagctaagctaggctgacttgttttaggtaattcttttgatgccgctagcttatcataatattggtctaatgtcagattttgtccctcaatataagttttaccatcaatgataattggaatatctaaaacatagacatcttcatgattttcgatagcctcaggcaagtaagctgaggtatccgtaataagtgctaatttcattaactattaaactccaatgttactcctggtctatctaaagcaatttctgtaacttcataagtcagacgtttaacgatttctaaaagaggagctgctagattctcaacttcatcttgactaaactcactaggctcattgataaggcgcccttggatatgagccatttgtgaaatgacaccagaaataacaaactcatcacgtacaataacaaattgtaacactgctacaatgctcgttacttttgctgcttcatctctattagctaattggaaagtaacttcaaaatttgtttttggggtaccattttcctcttcccattctaaattgcgcgcatcatagtggtattgattgacaaattcttgttcacgaatgacttccatgtattttctccttgatagacaatatgtattattatagcataaatttgtagattcttaaagcaggtgggaatctagaacttcttcttaggatgtctatcaatcacttcttgattgttactcaaggctgctaaacctttttctgtaagtgccaaccctctgacaacaaacaacttccctaattcctcttctgtaaaagcaatagctattgcctgatctaaatcagagcgtttcatctttgacaagccttttacgtttttttcttttaagaatagttttaaaagtggagcagataagtgatctaaagaatcaagcggtgactccattcttacaaatccattttttattaaaaattctaggtgttcttttccatttataccataaatgtattcaaaatattttgaaaaacttgtttcagttgtgaaagttccaaactgtatacgccataataagataatatctccaggcaagagtccttcactagtttcttccatatttttcctaggaacaactttactaaaattaatttcagccaagtctctttcaggtgagatataggggatattaggataatttttgtaaatttcttcaatagttttcatagtcatattgtagcaaaaaagcgcttataaaaacaagcgctaaggcatgggggaagtcacctttttgaaaaattcaatttcattttctgatattctaaccatgttaaaattatcatgataacatcaaatacacatagaaaaatcattaaaatgctatgactagaaaaatattcccttagttggaaaatgataaacccaacgaaaactaaaattgataaagggtaagcaaataatttctctttatgtaataaaataagtgctactaatttgataccgccatgaattaatagatagatagcggctaaatgactagccgaatcattaatataactgcttattttcaagaaatgagcagaaataaaaccatgaatcccaccgtgaacttcaccttcagttaaaagaaataggagatgttttatttgtgtaggtttaaaataatataataaaacgccagctactacttgtccgactgcaaatagcgtttttagatacaacataattgaaaaacttgtatcaactagttttgtttctttttcattccatttaatcattgcttacctcctttcctcaatcatattatccatttttttgcttaaataaatcatatcctattgaaaaaagattagcaattattaatgattaatctaccattcttttacaacataaaaaggcgaatagacccaataacgatagtttattcaccttttattcaatgtaaatttggataagttgagattaactattttattttacggaacaagccaaagagtacacctgagactaccgctccaattagaataaatagaatataaagtaaaggattacttgttaatgcgatgacaaaaatccctccatgaggagccatcaacttgataccagctaaaccaacaagtgctccagttaaggctgaacctacaataaagctagggattgcacgagctgggtcagcagcaccaaacggaatagcaccttcagtgataaaagataaccccataacgatatttgttagaccagattgacgttcttcattattaaatttatctttaaataataaagttgccacaaatactgctaacggtggaaccattcctccagccattacagctgccataacaacagagccgccatttgcaacagttgctgcaagagtacctgtaccaaaaacataagctgctttattaacaggcccacccatatctacagccatcataccaccaactagtaagcccatcaagactgctgaactaccagataaaccttgtaagaaagtgttaagagctgtgttgatagctgccattggaatgtttacgagcaacatcaagaaacctgtaatcaaaacacctaacaatgggtatagaagaattgatttaataccttcaagcgattttgggagacctgaaagtaattttctaagtagtaggataactccaccagctaagaaaccacctactaaagcccctaagaaacctgatggcacacctgctaatgctaaggttgctttcccaccttctgcaaaaggtactttaccgaatgccagtccacttgatgcaattgaaccagctacgaagccagctactagtcctggtttttcagctattgaataagcgatataacctgccaatactggtaacataaatgcaaatgctgcgccaccgatatttttgaataaggctgcaatttcatggtatgaacctaaattacttaattggtcttttggtacaccaagtatgttatcaaaaaggaaagcaatcgcaatcataataccaccaccaataacgaatggtaacatttgtgatacaccacccataaggtgtttataaaaagcagagcctaagcctgattttccatcagattcacctgattgtttatcattttgattttttgcatgataggtttgtgccttattatcgagaataatgttaattaagtcttcactttttttaataccatcagctaccggacgtgataccaaaggtttgccatcaaaacgatccatctctacagccttatctgctgcaataataacacccttagcccttgcaatatcacttgaagtcaacttatttcctacaccagaagcgccatttgtttcaactttaatacctacacccatttcagctgcttttttctttaaagcttcttctgccatatacgtgtgggcaattcccgtagtgcaagctgttactgcaacaatataatctgaacctttacttgttgattgtactgtttgtggagctactgtttcttgagaaatgctattactatcaaaagtagcaataatgtcatctggcgtttttgcttgacgtaattgatcagcgaacccttcttttaaaagatatttagatagttctgccaaggcagctaaatgcgtatcattagcaccatctggcgcagcaatcataaagaataaatcagttggctgtccatcaagtgcttcgtaatcaacacctgatgcagattttgcaaaaaggacagtagcttctttaacggcagcatttttactatgtggcatagcgataccatcacctaatccagttgatgtttgtgcctcacgcttcatgataccatctttaaaaatagcaaagtttgtcacaacacctgtgtcaactaattttgtaatcatttcatcaattgcagcctctttactggttgcttttaaatccataatcataacttctttttttagtaggtcttggattttcataatttttctacctcaactttattataaatatcttggataaactcagctgttgctaaatcatctgagaaagtggttgctgtaccacaagctacgccccattttagtgcttctactggattttttgacttaacaaattctcctgtaaagccagctaccattgaatcaccagccccaacggaatttttcacttcacccttaatcggttttgcaaaatatgaagcttctggagttactaacaatgcaccatcccctgccatagaaacgataacattcttagctcctttatctagaatcttatgtgcatatttttcgatatcaggcagaccttctagctctacgccaaaaatatctgctaattcatggttattcggttttactaaaagaggctgataagcaagagcgtctaaaagtgtctgaccttcaaaatcgcaaacaacttccgctcctgtctttttagcaattggaatcaatgtattatagaccttatttccaaggctagctggtgctgaacctgcgaaaactactgtgtcctcaggtgttagtctcgaaagaagtttctctagacgatgaagttgttcatttgttatcctaggacccccgccattgatttcagtttcaatttttgcttttactttaacgttgatacgtgtatcttcattaacagaaacaaagtcagttttgataccttctaatacaagtccatcttcaacaaaatgtcctgtaaatccaccgataaaacctgtagcagtattgtcaatttttaagcgttttaatatgcgactaacattaattcctttaccacctacatatttatcatcgctagtcatacggttaacactacccaacaatagtgtatctagacgaacaataaaatcaatcgatggatttaatgttactgtataaatcatacttgaatcaccttcattttctcttttattattgtcataagttctgaatcagtcttattagttactaaattaatgtcatttatctctttcactttagcaaatgtaacttgtccaattttagatgaatccattagaataaaggtttgttgactattattaataatagcttctttaatagcagcttcttctaaatctggtgtagttaaataaacttcatctataccattcatccccagaaaagctttgtcaaccgttatctgcctaatctgattaatggctacctggccaatactagcatctgttgaatgtttaaccgctcctccgataatgattgtttttatccctctatcaactaactttgcagcatgatgaatagaattcgtcaccaccgttaattgctcgtgagggagaaaatcaattaataattctgtcgtagttccggcatcaataaatataacatcttgctttgctatcagctttgcagtttgtctagcaatatccaattttttttgaacgtttttgatagctttttcttgattacttaattcctggccaagtgagtatggtaattcagcaccaccatgcaccctttttaaaaaacctgcagattcaagttcatctaaatccctgcgaactgtagattcagaagtctctaagatagacgttaattcatctaaagtaacactcttattttgctcaagtcgtgataagataatttcttttctctttgactttagcatagtccctccttgaattgaaatcgtttgcaatttaattatatctctttttctttcaatgtcaagcattttcttccaaaaactatcaataaactaaaaaagcctaatctaaagattagcttttacaaatactttaatttctcttcaaaacctttttaagaagctgaattcctttgtatttaaaaggacttggataatagttaaaagttcccattttacgaatgatacaaccattaaaattctgtttaaagcgaagaatactatctgaaccatcaaaagttccctgaatacctaggaggttatagaaagtagaacctcttttgagagcctcttgcataacatattcctgaagaactgctggtgcataaaatttattaaattctgtgtaggatcctgaaaagaaataaactgtctccttaagactataaacaaatagactaccagctaaaacaacgtcttggttatcatacttttgaataaatgactgaacttcttgtcgtcgtgtttcaaaactagccagttgattaattatttcagagcgttgcctatgatacttaggagagtctgcattttccctaaaacgttcatcaagcaatttaagcttattttccaatgcttcagcttttatttgcaagttatggtcgtattctctaaaatttaaagtggcaatcacaaattcagccttgccttcaaagctatcgtaaaaatcttgataataatctaaggacttatccatataatcacgtctatttgacgtagaagttgttatctctttaaataaatgtagctcatcacgtttaagaacgcgaaccttgattccaaaagacattgctttcttaaccaaagctcgtcctgtcttagagaatgaagatagtaacgtttcagaagtgacaccttctaaatttttaacatagtgccaagataaatatttaccagtaaaaccagttgttaaaccatcatggtgataacctgaactggtaaaatcttcaatcagattatcatttccctgattactaggaactcccgaactagtgaataattggtaatcatcataaggctcaactattaattctagaacaccgttggatttggcatagccttgcaatgctttataaaattgttttagatacttagaatttgaatgaactggtcctgaatcaattttcatttgaaaaccaccagtgactggcataatataagataaactgattatctctagtttattttctacttgatatcccaaatacctaacatcatagccgcgtttttctaaaagtttagccatctcaggtgtttgtaaaaatgattgtgaatcataatttcctgaatgttctttaaattcttctattgttaattctcgaagcgtcataaatacctttcttaactatttcctacttttctccacattctatctattcgatactatccaaataatataattttgacgtaaatctccactgttttttccaacacacataatattagtaaagctaaatctaaaaagatttagctttaaatttcaatatagcgacgaataccggaataactcttgtatgaaatccactgatgaccatctactactaacacttgatcataatgtattttttcacccttttgaaaattaaattccactggacttgatactttaggttgacttttcacatctacagttttagtaaatgtataggtacctgttttaggtaagttgggataactagtcggtttagtcgcctcatctttcgctttttcactacttgtagttagctttttcacaggaatatagcgacgaacaccactataagatttgtaagaaatccactggtaaccatctgctgtcaatacttgatcataatttattttgtcacctttttctaaagtaaattgggtctgacttgatattttagcttcattttttacttcagtacttccgataatattataaacaccagtctttgctaaaccattttcaataggttcttgagaagaattagttccagctactgtcactttagttcctgttacacctacaagtgtcccactagcttcttggtagtataaatgaatattataaagacccttctcattcttatggtcagcaaatgatacagctactttgtagttgccatccccagtagttacagctgtataccatttaatatcatcttgccctccttgttcagtccaaaccggtaccttaacagcagcgataccgttatcatctttaatattcgtaattaaaatatcaaaacctgtagttgtttcgttagaaatagtcagtctaccagttttagtaatacgggcttgtggttgaggagacactttttctttatcttcagttttttctactgaagatgctttacctagcaaaacaaaacgacgaacaccattgaatgatttataagataaccactgatttccttcaatagttagtatttggtcgtaaaaaattctgtctcctttgtccaatgtaaattgagttggactcgctaccttagcttcattttttacttctactttatgtgaaaatgtataatttccttgcgttgctattttctcttgattattgcttcctgaatttgttacaggagtaggtgctttagtctctgaacctcctgatggatctagtgactcaatagctgcgtatcgacgtacgccacaaaaagacttatatgaaatccatttcacattatctttattaaatacttggtcatagaaaactttatcacctttctttgcatagaaagctactggggctgattttgaaggtgtatttttcacctcggtttctttgctataaacataattcccttgttcaggtaatgttttttccaccattggctttgtctctactaaaggagtagtaatgtcctttgttgccgtattttgactatttacaactttatcagacgcttgaacactatcattattggaagtaatcacacttgacgcacttgtctcattggaagaattattagcatccacactagtgcctgtctgattattaacttgaaccgatgtagtttgatccgcaaaaacaggacttgtgaccattatgaatgaccctaaaattactgatgctaaaccaaatttatatttacgtagagagtaagattgcttagtatcatttacttgtccttttttcatcataaacacctacttccttatttatttacactactattataatatcctttttgtaacatgtcaacatattttagaaatatttgtaatacaaatgtaatattttatgctgtaaatacttctcgaaaaaaatacccaactcttattattcttagtataacaaaatcattatcattaagcatatcaaaaaaccgggcactattctcccggttgattattattttatgctaagtacattttctttagtgtgaattaattgtgtgattaatcgacagtaaggtgtatcaatgcctaggttttcaccttttttattcactgcgccatttaagaaatcaatttcagttaagcgctgattttgaactaagtcttgatgcattgaagggtaatgatgggctgctttaacagatgtatccataacgtactttgttatttcttcttcatcaagctctacaccttctgcttttccaacagtaacaaattcatggataatttcatgtaccatatttacgccgtcttcactagcaaagagttgaccaattgtacaatctagcaaggcgcaagttgaattcatcgttccgttaacacaagcttttctccaaatatttggcaaaacattttcgtcataagtagcctgtaattttgcttcattaagcaattcagtaacgcgatgacctgcttcttgattgttaggatcgatactttgaagatttacagaaccaactccttccagatgagcatgccctggtcctttcaaccctgcagtccaaactgttactcccatcaaaatattgtgttcagggatatattgacgaatgacatcttcatgtcctaatccatttaaaagacataagacctttgttttcttaccaataatttttttaatatcttgaagcatatttggcaactgcattgctttagtaaacaaaataattaaatctgcttcttctgtcgcatcagttggcttcatgataggaagtttaacaaggtcctctgtatcacctgttaccttcaagccattttctttaatagccataatatggtctgcccaattatcaagtaaaataacatcatgatttgttttagaaatttgatatccaaaacgacatcccatagcgcctgaaccagcaatataaactaacatacaacctccaaattaattttgaccttcaaaaacgaaaatatcgtctttataaagtttcagaatgtctttacaaattttgtgtgatacaaaacctactgcaaaaggaataacgagccaagataagataacaatcaacatacttgctcctgcttcaaatgaagcaatcggacctactgcaccaacaagcccaaaaccagacgaagctggtgtccccaccaatttaaacaatgggactgttagagaacttactgtagcagtcataagcattggaatcgccattactggatgctttaggaaatttggcatcatcatcttcattgcacctaaagcaatagcaattggaactccagacttattagccttcatcgttgcccaaactagcactgctgttgttgaagcaactcccattgaagctgcacttgctgacataccattaagaccaatcgctagaccaatcgctactgttgaaataggacttacaataagcattgaaaaagccatcgcaattagaattgacatcgcaattggttgtaaagtagtaaaagaattaattccttgaccaataagtgttgtcacatatgaaacgtaagggagtaatttccatcctaaatagcctacgcctgtacctatgataataggtaacaagataatggttagggaaccaaatttattaccaaaccacttaactgctaaaactgctaaagctgctgttagcatcatattgatgagatcaccaatcccacgcaattggaaactaccagtagcaactcctttttgaataacttctgtgtaagcccacgcaccagaaccaatatatgcagcacctccaacagcaagctgttgcattggggtgaatttaaactgttgaccaatcaaaaatcctgccataattggtgtgaaaaattggaatacctgcacgatgtgtaagaactctgcagcaagtccgtaagataaaaatggtttcaaaaaagtggctaggatagcatttgggatgagtgctacaacgattgcagttgctgtcccacctaacactttattgataaaagaaccagccgtctcttttggtgttaccgtatttgtcataaaatacctcgcttcatttatttaatatcattcataacgacaaagttaattatatcacaaaataaataggaagctttgttatttttttaacaatatatataatccttttttataaacttatcagttttatttatagttattttatcaatgatgttgaatggactacacggttatctcgatcaggataaatataattgatagcttggtttatagcgactggtgcttccccatatcctgttgcaatcaattctacctttcctggataattagcagcatctccaatagcatacacgccttcttgagtcgtctcaaaaagtgaagaaacattgatactagaccgtttataatccaaattccaataacgtaaatttttattagaagtagaaaagccaaaactaacaatcaagttgtctaaaggtaattcaattacttcatcacctttaactttttgaacgaccaagctgctaactctctgactatctccatttaaaccaattgggacataaggggttaaaattctaacacctgatgcctttagtatatccacactatgctcatgcgctctaaaagcatctctacgatgaacaatcgctacactagctgcaatcttatctaattcattggcccaatcaacagctgagtcgcctccaccacaaataacaacatgtttacctgcaaactgttctaactttgtaacgttatagaataaattattatctgcataattttcttcattttccaaacctagtaaacgcggagcaaaagcaccgttgccacaagcaaaaacaatagcacgtgacaaatgttgatctttatctgtttgaattgtgaaaacatcatctactttttcaaatgataaaacttcttcttttaaacagatttcaatagaatctttaaatctctctaattgttcaatatgtttatcaattaattcacgtccagtaatcaccggataaccaggaatatcatagatttttttctcaggataaaggatagctggctggcctcctaattccgaaaggctttcaataattttaacggatactccgcgtagtccagcataaaaagcagcaaagagacctactggtccgcctcctacaatagtgatatcataaattgttttgttcatttactgtatctgttctttctatttctgttttaattttctctaagataagtctctcttcatccgtcattgcataattttctaacaagtctggtcgacgttctagtgtttttcgcaaactttgttctaaacgccattttcggatattttcatgatgaccactcatgagaacatcaggaactgtcatgcctaaataatcatatgggcgcgtatactgaggatattctaataggcccgatgaaaatgaatcatcctgatgacttgtttctttacctataacttctggaatcagacgaacggtagcatcgaccattgtcatagccgccaattctcctcccgtaagaacaaaatctcccaaagatacttcgtctgttactaatgattttatacgttcatcataaccttcatagtgaccacaaataaaaattaattcatcttctttggatagttcttctgcaaaatcctgatcaaatgttctgcccgctgggtctagcaaaataacacgtgctttttgagcatctattttatcaattgtatcaaaaataggttgagcacgtaaaagcatcccttgccccccaccgtaaggctcatcatcaacatgtcgagacttctcagcattttctctgaaattgtgataattaatttcaagaagtcctctttcttttgccttaccaactatagaatgttccagaggggcaaacatttcaggaaataaagttaaaatatcaatcttcatcatctaaaccttccatcaattcaacttgaacacgctgattagaaaggtccacttctaatactactggcgggatatagggtaataaaagatcacgttttccatgacgttccacaacccaaacgtcatttgctcctggttgtaaaatttctttgatttttccaatcagctcttccccttcatagacatctaagccaataatttcatgataataaaattcaccatctttaaggtcgctcagttgatcctctgccaccttcagtgtgaaacctttatatttttcaatatcattaatatgatacattcctttgaattttataatgtcaaaattcttctgcttacgatgactagcaatttcaatatccataacaaactgattcttttcatcgaataaagctaacacttgaccttttttaaagcgttcttctacaaagtcagtcacgcttaatacacgcatttcgccttgtaatccttgtgtattgacaatttttccaacgttaaagtattccatagtaactccgatatttttgaaaataaaagaaaaaccagccgctaaaatgcaactggccacgatagtccgtacgggattcgaacccgtgttaccgccgtgaaaaggcggtgtcttaaccccttgaccaacggaccatgtgaaactggggtagctggattcgaaccaacgcatgagggagtcaaagtcccttgccttaccgcttggctataccccaaaagacaaaatctagtatatcgaaattctagattactgtcaatatcttttcgaattaaattttaaatttcgattttatcccttttaataaagctcatatagagtctatcaaagtattttatgtttcatttttgaaatatattcaaaaactttttggtcccttttttcgataatagcttgtaaaagtagttcatggtactgcttattattcatcccaatttctaatatatcttgtatagccacacctgagtcattttttaaagaagatatatagcgtctctcagcaataatgatatctgctttttttagtaatttttcatctatctgagtcgtttgatagtttacaaaaaagaattccgctatcttagatgtaaaatattggtttaacattacttgataggtttgtaatctaatattactagatgaaattacatatacagaaagaggagctaagaaagtctctattaagttagataattgcattgttagtagcactgtctcatgttttgaaaaagttaaattccctcctttaaggttaaaaatatcagccagacctttatctaataggtgatataaatccttagaatagctcagccttgatgtatttaaaaaataaaaatcaggaataaaataataacaataacaaataaaatgtctcaaaaaataggcattaatatctttaaaatgctgcgagtcaataaattctctacccaataatcgaccacaaaaattcttaaaggctttagactttgatatcttataagaagcaaaaataaattcttcgttgatattgatatcatctcgattgctaaatagaggaccatcactaatacaaaacactaaatatagataatcaagtaaaccttcattcaactctataccaagatgtatagcaatactcttttgagctgctttggataactccatgtagagaatagatttttttagttgattaaaggattctgtttgaggaatttctactttatattcttttcttttccaaactaaattcaccaaaatataaaaatagtaatattcttcagataagtctttaaggtcgtagtcacaccctttaaaattcgagtattcaataaaatcccttatcattacctcacttgtagcatcaaaaggataaataataaaaccaaaatgatactgtaacaaagcaatcagcagcctaatctgatattctggacctgtcactttatttttttgtattgataacttaacactctccaaataaagtttacagtttttctttattcggtaggcacttgcgacggatatgaatttcttagccgtgaattcagaaaaactgacattttgaggagcaataaaatatgccaaaaactgtaacgtattagactctcgataaatggtatgcaaagtctctagcttagaaagtgtttcgtaatggaacaataccattgttctacttttgacaacaaggtagaaatcagaataaagtatttgtagttccgaaataagaccttgtaaaatcttttcactcaaagcatattctgttttaaagtgatcaaggttaatttctccatcatcaagtaaggcggtcatcaggtatgctttcagttttattttttcttcgagaaaatcaaatagcaatatcttatcctccttaataaaaaatcagaaaattccctttcacatccattatattctaaaagactaaaaaactcacaatttttgtgtagatataacaaaaaagacaggaagttcctatcttttagaataaattattctttctcatcaatgatgagtcttacttttttcccttgtgttggtaccgaatagacaatcgaccttatcgctgtaattgtacgaccctttttgccgataacacgaccgatgtcttgggtatctaaatcaagatggtactctaaaaattctgggccatcctgaatttttatggttaactgatctggttgtgaaatcaaaggtttcacaatagcaataatgagattttcaatggtatccataagcttttattattttgagaatttttgatcgtggaatttagtcataactccagcttttgaaagaaggttacgaactgtatctgaaggttgtgcaccttttgataaccattcaagaacacgttcttctttgattgtaacttggttttctgcaactaatgggttgtatgttccaacagtttcaataaaacgtccgtcacgtggtgcacgtgaatctgcaacattgatacggtagaaaggtttcttcttagaacccatacgagttaaacggatttttactgccatttttaaatagtctcttttctttttctttatatttggtcgttgatagcttaactaacaactttaccttactaagtataacataaatacaaactctgtcaagaaaaaatcttgacagagtacatgtttttttattcatatcgtaaagcatcaattgggtttaatttgctggctttattagcaggtaataaaccaaatataattccaataaatgctgagaaaattaaactgcctatagccacgttaagtgacacagaaggagtaatcttatcttgcgcattagcaattaacatcgtacctccataggctagtaataacccaattaatccacccaaaatcgttaagaccattgattcaattaaaaattgagctaaaattttacgtcgagttgccccaagggctttacgaaggccaatttctctcgtgcgctcagttacagagactaacataatattcatcactccgataccaccaactaggagagaaattgctgcaatcgctccaataacacctgtcataataccaacttgggtattgatagatttaactatagatgtcatgtcaaaattatcatagtacccatccttagcatgactaatgtctgttaaacgtttgcctatttctttaccaatgcgattggattgcgatacatcattaagatgaaaatatatgttttctgcttctttagcaccaaactccgaagctaactgtgtattggttaaaatagcattcccatcagaattacttccatataagcctgaaccagcttctggatccgaataaacccccactactaagtaagatttattttttacagtcaccaccttatttaacgctgcttcatttgtctggaataatctctgagctaatttttcttctagtaaaataactctcgagaattggttataatcctcctcttggaattgacgaccacttttaattttgaactttttgataccaaggtaagtgcggttaattcctgttatattaaccgtctttgcctttttttcaaggtaagctactggagcatttgtttgattggttacatagtagccactaacaccatctacttccttagcaatcttttttaaccatgattcttgaataattggttccttacggttggtatcactaccttgcatgaaagccccttgagctccaaagttatcctcatttttttggtcttcttttgttttataataaatctgaaggttcttctgagactttgtaatctcatttgtaaccgaatctttcatgcccttacctaaggccataattaacacaactgatgcaaccccaatgatgatccctaacatggtcagaaaagcacgcatcttgtgccctagaatcgatgatagggcaaacttccaattttccataatcgaatctccccttaatcaattctaatactatcagtagtatctgctgtaatttcgccatcacgaataacaattttacgagtcgcataatcggcgatttctggttcatgagttaccatgataatggttttaccttcttgatttaattccgttaggaactgcataatttgctcacccgtctttgtatccaaggcaccagtcggctcatctgctagaataatagatgggctattcaccaaagcacgcgcgattgctacacgttgcttctgtcccccagataattctgttggcagatggttcatacgctctcttaattcaactttatctaaaaattgttttgctaaatttttacgctttttaggaggtacacccgcataaattaagggtaattcaacattttgtaaagccgttagtttagataacaagaaaaattgttgaaagacaaaaccaatttccttatttcgaacttgagctaattttgtttgacttagttcttcgacacgtttaccatttaaactataatctcctgaagttggagaatccaacaagccaataatattcattagtgtggatttccctgaaccagatggccccatgattgcaagaaattcaccttcataaaccgtcaaatcaatgttctttaagacttgaagtttttgatccccattttgataacttttaacaatctgatgcaatctaatcagttcttttcgattagttgtcacgattatttcacctctgatttcttattagagttaagatcgattgattcaatattatcaattttttgcccatccttgaaggttttacttggattagtaaccacgatttgtcctgctttcaaacctgataaaatttcttgtgtcttagcatcagctttaccaattttgacttcaactttggaaattttacgattagaatcattgtatacccaaacaaagtgtttattatctttgtttatcacagaacttgtagggacaataaggtgcttatctccattaactacttcaactgatacggtaaaaccttgttttaatgcatcgagagggctagtaatatctactttatatttataatttacagcactagagccgttattagagtcattgttgtttgcttctgcttctggataatttgagatatatgaaattttaccttcccattccttgtcaggatagaccttagattttattttaacagcctggtcttttttaacattagccaaatcatactcactcatcgttccttgtacttggagtttaccttcagttgctacatggacaagtacttgactagtttttgaagctggatcaatatcactattaacttcaacaactgtccctgatacgtcacttgtaataacagtatcattcaatgctttttgtgctttatttacttctgcctgtgcatctgcataagcatcattcaaatcttgaagttgttggttgtatgaagcattagcttgactttgataattttgctgtagacgattcgtcgcaccactagtcgattgagtcccttgtccttgtgatgatgaagaagattgatcacttgattccatagctggaagacttcctgttgtctttagattattaatctgacgcgctactttatttaattgacgattagcagtgtcgtaggctgcttgtgcagttgttgtatcatattgaactaactgctgaccagctgtgattttatcacccactttaactgtgacagttgctcgattacctttattagcatcaaaatacacatactgttcttgattagccttagcttttcctgtcaaaagagttgaggacgaaacacttccttctctaacattaaaaactttgtagttagtttttactgcactcttattaggttgagattgtacccataaaaagccacctattactacaattagtgccactgagagccctgatataattgctccttttttactaattcctaaattttgtcgtttactcatgtccatctcctgtttgtattattaatatagaacaagtgtattatttttaaataatattgtcaagaaaattctttaaaaataatatttttactcattaagtatactattttgctcatagaaagaacttacaaaattgaaagtactttactttttaccacaaataaaagctgagatatagatctcagcttttattaagaattgctaaatagactgacaagagatagaaaaatttttcatttttgaaaacatgtctgcttgactttctcccaataaatacacttcttccacctcttctatacccataattgttaatatggtctcaatacctatagtgtcaaaaattatagatgtatcatttaattgttctatgaggagaggttgattggtaacaattaataattctaaatgagtttgtttgatttgcttaattaactcatttaattttactagggaataacccttgtctaccattatcaaagccttttgacaaccgctagaaatgtagtctgaatgccaatcatagcttcgaaaatactgaatttgatggccagttagaacaccagaactttgttcgacttgcttcagaacaggtgcgacactatgtttttttcgatattctaacatgtctatcaaagagatttgccaactactagcaatatagtcatccgaaaaaccataccttttagcttccttataaatatctacattatattggcttttattcaggttttcatacaactctacaatatgtaaacatttatctaagtaaaaagggttgattttagtaactgaggataaatcatacaaatcaaagccacgtctaaaagcctccaaaagataagctagacgattttcttttttctgaatcaaagcaaacatcaaatcttcctcgctaatatcactcagaaatggaaaatgatcatgactgctagcctcgagtaaatttaaaaataattgctctatattacgagcaaaaaagatatagtcaactttttcaaaactaaaagatacggtagctacatagtctaattgcggctctaaaaaggcagaggtatttgggtaataagaatgcttcagttgactaaaagtatatcccactgtcaatttagttgctatctctaaaacaggataggtcgtaatagtctcaaataaaatgctttgatgagacaaaccagatgataaactaattatatgataatccaaactgttcaaatctattaagaaactaaagtaacatactccaataatgtttgcttttcgacacacatcaaatgcaacatctcgaattgtttgcctagcagcatcggataaagtttgacttggtacaatcgctagagacttaccagttgttttattagattcaatatattctaaatcagagacatataaacaattattcaaagagtctctcattactaaacaatctacttgcacaaagtcttgattattgtctattgcctgaacacttttttctgataaattatcgctgatatactgccttgaataatgactctgccacgctaaaaactcttgaaatagctcatgatttttatctaagcaaagggggtaaatcaaactatcttcatgtgtatttatataccccacaagcgtctcaagattttcaaattgtgcatcataatggtgaatcacatggtttagctccttcgagataagaatactaacaggtctatcccttttagataacctctcaacagttgatctaattaaatcgtcatattctttcattttctgtccgaaaataataagcaaaataggctgtttatcctttgtatttagcatatacgcacctccttattaatcagctcaccgactgactttaaataataccttatgtttaagcgcgtgatccaatcatttctaaaaattcatcaaaaaaataggtcacatcatgagggcctggagcagcctctgggtaaaattgcacggacatcactggaaatgagcggtgccttagagcaacaatctcttgatcattcaaaccttcgtgtgttaccagtaaatcatgcggaagatttagccggttaacggtaaaatgattaaactgactaactgtttctaaacgacccgtagcaatatctctcatgggataatttggccccttcttagcaactgggagtctcataatttctgcaccatttgccatggcaattaattggtgccccaaaccaatacctaacataggaacagatttttgtaattctttaatagtgtttaagatttcctgaagcttttctggattccccggaccattagataatatgataccttctgggtatagatttttaataccttctaaagacgtattgtagggaatgacagtcacgtcacactgacgtttagacaattctctcaaaatagaatgtttaagaccaaaatcaagtacaacaatatttcgaccgctagcaggcgacggataagctgtttttgtcgaaacttgttccacattatttgtcggtaatactgtcgctattaattgatcctgtaaatgtgataaaacatcacctgcttctgctaaagtagcttttacaaatcctttttctttaataacttgcatcaaataccttgtatcgacccccgacattgcaggaacctttttcattttcaaaaattcatctagattcatcttgctagtatcgctacttacacatctggaatactctgcaacaacaactcctaaacaagtgggaataatggcttcagagtaactgcgatgaataccataatttcctattagcggtgaggtaaaaactaaaatttttccattatgtgaaggattcgttattatttcctgatagccggtattccccgtacaaaaaactaattcgccagttacatcaagagatgaaccaaaggatagtccttcaaaaaccgtaccatcctctagaattaacaatttttttgccattgtggttcttccccttctataaaatcatcgtaaataatagtcgtctacttaactcggatcaataatactcacacgatcgtaaccatcatgttccatcacttcaactagaatttcttcaaattgacttgttggaatatttttccccacataatctgcacgaataggtagttcacgatgcccacggtcaattaatacagctaaactgacacgactcggacgccctaaactaacaagattatcaatagcagctcgaatagtgcgacctgtatagagaacatcatcaattaatataatatctttatcagtgatgtcaactggcatagttgtggtgtcaacttcaactttcatatcatcacggaaaggtttagtatccaattctccaacgggaatatctaaattttctaattgcttcaagcgttcttgaatgcgtttggctaaaaaaacacctcttgttttaatgcctgctaagacaatattatctaaatttttgttacgttctataatttcgtaggtaatacgtgtaatagcacgtttcatggtcacatcatcaataatttcttttcttttcattgcagtatcctctctaagataaaagagccccttcaaaaggagactctctagaatgacaaagccgctcaggcattgatttagtctgaagtttctccttaactatctcactggataaggttaaaggaatgatttgcttatattatagcaaatggtaaaagtatttttcaagaaaaacttaattttttctcaacttttctaaggttgtctgaaaaatttccggaacctctactgaaaaaatcaaattctctccgttactagggtgcgtaaaacctagtgtttgtgcatgcaaaaactgtcctttaccccctaaagtcttacggggaccgtagacaggatcaccggctagaggatggccaatataagccatatgaacccgaatttggtgtgttcgacctgtctccaatgacaattcaactaaggtataatcaccaaaacgttctaaaacatgaaaacgagttattgctggcttacctttagcagtcacggcttgcttcttacgatctttatcgcttctaccaatcggagcctcaatcacacctcgatcatttggtaaattaccatgcacaattgctaaatatttacgaagcgattttttatcttttaactcttcagccaacacttggtgagctctatcattttttgcaaccatcaataaaccagaagtatctttatcaatacgatgaacgatccctgggcgaacaacgccattaattgatgataaatccttaatatgatacatcaaggcgttaactaaggtgcccgaactgtggcctgcagaagggtgaacaaccatcccttgcggcttattaaccacagcaacgtcatcatcttgatagataatatctaaagggatattttcagcttgataatctagtacttcctctttaggaatatcaaaagtaatccgatctccttcttgaacagtatatttcgctttttttacttgtccatttactaacacaatcccttttttaatttcttcattagcttgactacgcgacagttcagaattatccgctaaagctttatctagcctaactcctgctattttaattgtgatttccattactttcctctttccaaagtgcaatcattaagcaaataataccgattgtcagatatgagtctgctacattaaagatagcaaaattaataaaatctaaatgcaccatatcaacgacataacctaatcttaagcgatctataaagtttcctaatccaccagagatgattaaggttagagaaattaataaccaataacttccattaatatgtttcatcaaataaataatagcaacaccaacaacgaagattgtaattaaggtaaaaagccattgttgattttgcaaaatagaaaatgcagcaccataatttctcagataagttagactaacgatatttggaatgaattccttaatttggtttagttcaatatgtttaacaatccataacttagatagttgatctaaagcaatcaacaaaatagttattattggtataataatctttctcattacttctcctatgaattaaatcccttaaaatactcttccataacagcaacaaattttaaagccatctgagataaattacgatcttttcgtttgatataaatcatttggttatctagatgatcttctaatggaataacagtgataccattcacactgcggctatccaagaatcctgagcccgtcgcataagcttgggttctttctaaaataccatttaatgttgctctatcagtaacattataggtaacagaactatcaagtacttccacaaaattctccgagtaataccgataatcatctctatcctgtgtaaaacgtacggttggtaatccttctaaatctgtcattatcagagatgttttactagccaagggatggtctttcccaagataaatatgagttttaaaaggaataagctctacaaactctaaccccaatttgtccaaccgctgaagtagaccttttttattttgactattgatataaatgatacctatttcgctattcccttgagcaacttcatctaagatacgtattgttgttgattcgaaaatacggaaatagctaaaattatcattacattttgaaaacgctgtgattaaaggaggtagaaaatcataatgttgacttgctattgagaattcttgctctgtagcttcagattgcgaaaactgtttttcgaatgaatcaaagcttttcacaacttctaaagcattctcataaaaagtcatgccttgattggtcaacactgcaccagtagttgtacgcgtaaaaatctgaaaccctaattctgtttccaaatcacgaacggcaacagataaacttggctgactaacaaatagttttgcagctgcttcacgaaaagtaccactatttgcgatagcaacaacataacgcagttgttgaatattcattttatcacttcctcattttagtacccttcattataccaaaaaataactatccttgcggaaaattcttcatgaattaggactatttcactataaaagaacaacaaagtttatgagtattaatgataaatctcttaacatattgtcttttgttacaaaatgaaagctctgacaataataaaagaccttatgaatagtcataaagtcttaactaggcattattttgcgattgggtaaacagacacttgttttttatcgcgtcctttacgttcgaaacgaacaacaccttcaactttagcaaaaagtgtatcgtccccaccacgtccaacgttagcacctggatagatgtgtgtaccgcgttgacggtaaagaattgatccacctgatactgtttgtccgtcagctgctttagctccaagacgttttgcttgtgaatcacgtccgtttgatgtagaacctccaccttttttgtgggcgaaaagttgcaagttagcaagattcatttttaacataatgttgtgtcctctcttaaattagtgtgtcatgactactgtactaacaaattcagaagaatctttagacagattagtcattccaagaaggtaagactcaaataataattgaaccttatcctctttatgttgtggtatagaagataaatctatcttcatataaccaccttcaacgtcattgataatcaattgcgcttggcaggttgttaaagcctctaatgaattaataaaattaattgataaagtactaacagctgcacaaatcacatcaaagccgtactcgccactaccagcatgaccgctgatttcagcactataaagatagcctgattgattacgagtaaaagttgctttaatcatgaaaaattaagcgttgattgcgttgataacaacttttgtataaggttgacggtgaccttgtttacggtggctaccttttttaggtttgtatttgtaagaaacaactttcttttgtttgccttgtttttcaacagtaccaacaacagtagctccttcaacaactggagtaccaactttagttgtttcaccaccaacaagaacaacttcgttaaatgtaacttctgctcctgcttcaacgtcaagtttttcaacgtagatagcttgtcctacttcaactttaacttgtttaccaccagttttgatgattgcgtatgtgctcatgatgcacctcctataaaaatttcttgtgaggtttccctctgtgaagactcgcctataaatcgtgagagccttgctctacttaatctaacgattttcgcgcggttgcacaggatgtgcatttagtcaacattcaaattttatcataaactctttttttatgcaagataaaacaaaataaaattatcaactttaccacttcaaattaactaactcattcatctccttatatgctttatcaactttatctttcatagtctgatcaatcgtagaacgtttcttaccaccttcaatataatcctctaaaactagcgtcctataatcataagctggaaagccttcttcaacataacggccatttggttttgcttctactagtgttggatgcgccttaacttttttaattactgttttttgaccttttttctctatggttacatccattaataatcctctttctgtccagatatcatcaaccgtttctaaacgctgatttgaaataaaatttcccatagagtaaataataaattttttctggccatctttttttatcacttcagacggttcaacaacgtgagggtgtcctccgaatataatatctgccccccatttaatcatactatgataaagcattacttgttctgtagtaggttttttttgatattctatccccatctgtggcatgacaatggtgatatctgcttctttttcagcctttttaatatcttgcttaatctttttagtatctaaatcagacatatgtttttcatagtcactctttgaaacattagcttccataccattgtagccatacgaataacctaaaatagcaattttaataccatttacatgcttaattaagatatcttctttatttctatcctttaaataaaccccaatagtatccaatcccagacgattaaaagtcttgacagtattgatagcacctgccagttgtgaatccagaatatgattatgtgctaagtcaacgacatcatatccagtttctttcatagtagttgcaatctcattaggagcattaaataaaggatagcccgctaaaggatattctgaactaatcgtcccttcataatcaccaatcgctaaatcagcgctctcaatccaagattttacctctttaaaataaggagtaaaattataagtgccgtcgggttggcgcgcactggcatatagtacatcgtgcagcaaaatatctccgtttgcaaccacacgtgctgtttttacagtattattatttgcaaccttttgccctttagattgtgctaaatccttagataaccccaaaataaaaatagcaataataacggctacacaaaaaataagtgttttctgataagggattcttgccatacttgcctcctttattcgtattatagcattttttataaccttatgatagcgcaatcattttaataaaaaactacagagtaaatctgtagtttaaaaattcattataataaatcgtcaatcaagtcatcaacatcatcactatctgcttgaggttgaatagtagttaccataatccctgcaactgccctctctacaagaccttctacatccatacgtttctcatactgttctgtattcttaattttagggttagtttttgggcgatctggtgcaaaaatcgtacagcaatcctcaaatggttgaattgaaatatcaaaagtatctattttttgagcaatatcaataatttctagcttatccatcgtgaccacaggacgaataatcggtgttgcagtgacagcattaatagcttgcatactttctaacgtttggcttgccacctgtcctaaactttcaccgttaataataacaagaccatttcggtcctcacgaatacgatctgtaatacgcatcataaacctacgtgttaacgtcatcaagtaggcttcgggagcttttgccttaatttcctcttgaatttctgtgaatggaacttcaataaattgaatattaccaccaaattttgtcaatttacgtgttaaatcatgtgcttttttcaatgcacctgggctagtataaggaggacttgcaaaatggactgcttctatatctacaccacgttttaacgctaggtaacctgctaccggagaatcaatcccaccagacaacatcagcatcccttttccagatgttcctactggtaatcctcctgcacccctaatatcctcatatgaaatataagcagcctcatctcgtatctcgactttaagattgatatctggttgcttcatctgagccttaatatttggcaagactgaaaaaacagcatctcctaaagtatgatttagagcacggctatccaattcaaatgagtggtcactacgttttgcggtaattttaaaagtcatcccatctttataaacggaagtcataatttcctggacagcttttaccaatgtatcaacatttttttctactttaaaagatggagaaaaagcttggataccaaaaatctcttttaaggactctgcaacttcatgataatctgtaccattgagatatacatgtcctctatcacgatctgtttttactgaaacatctggataaatggagagtacatgctccatattattttttaacttattgatgaagcgcatacggtttttcttcttagtagagagttctccataacgaatcataatttctgaatactgcatcttatcctctaactttcttagttttttcataaacttgtttaaaaatagttaaaaattgctctacttgtcccatatcattatcatcatctaagctgatacgtacagcagtttgggctaacttagttgaaattcccattgctataagagttcctgctggtttacctgctttagaagagcaagcgctagttgtcgagataaaaatatcatgtccctcaaaggcatggacaagaacttctcctcggacacccttgataccaaacgtgataatgttaggtgaaaaatcttccttacccgaaaataacgtaatatcctcatatttggctaattcatcatgaataatggttttcattttacttattttaggaatagctactacttccttgtccataaccattcgtaaagctttagcagtagctgcaatccctgcgacattctcagtagttgaacgtaaatcagtttcttgtccaccacctgttagtaatggtgaaatacgttttccttctttaatatatagaaagccaaccccacgaacgccgtgaaatttatgactagaaaaagatgcaaaatcaactcgctcagtcaaataatctttagtcggtatcttacctattgcttgaacagcatcaacatgaaacgatatagtaggtttatctgacaacaagtctgaaatagcttttattggctgaatagaaccaatttcattgtttattgccataattgaaataagaatcgtttctggtttaattaatttgaccagtgcttctacgtctacaaatcctttatcatctactggcgcataatcaatctcaaacccatactctccaagccatttagcagactctttaacagctgggtgttcgatatcagaaacaataatatgatttccaaaatgttgtttctcaaacgcaagacccttaataacccaattatcggcctctgtaccaccagaggtaaagaaaatttcatttgctttaagctcaagtaaactagcaatttgtttacggctagcctctaaaatccgagaagatgttgttcctagctcatgtaaacttgaggggtttccatagattttactagctacttcttgataagtccttaaaacttctggatagggaatagtagttgccgaattatcaaaataaatcataaatctgtccttctaaagtcaatcagtgttattatagcataattttcctactatttatattagtttgtgaacatcccaaaacaatatttatgataattctcataatttatcacaaaactcactacctattacactaacatagcttaataacctaggttgcttatttaaatgttttaaattattttttctttagctttttttaggataaaatcatataatagttgatgtacatttaaggagggcgtcatgtcaaaaggatattcaagacaacagaaaaagtctactaagactaatactgattcaactcaatcacccgctaagcatataaaaacaggtttttctgcacttcaaaaaacaattgcattagtcggtagtgttttaagtattattgttgcctctattactattactaatgcgattaataatcacaaagactctagtaagactgattcttctacttcaaaaaccgtcattataagagaaagtggacaaaattctagtaaccaagtttctactgaaaaagatgagacaagggcatcatccagccaaacactagaaaattcctctgctagtagtactccgagtagcagttcaaattctgctgccaataacgatcaaacatcatctagtactaacaatgatcaaacaaataatactactaccgatacctcaactattgaaaatacaacaacaccttaaaaaagctaggttccctagctttttttgtattctttgatagcgttagcgcattgtaacaaattcctcagatccagttgggtgaatagcaacagtatcatcaaagtctgctttagtagcccccattttgatagcaactgaaaaaccttgaatcatttcatcaataccataaccaacaccatgaagcccaataactttttcctcttttcctagggttatgagcttcatcttaactgcttggcgattagtggtaacagccgtatacatagaggtaaaagttgatgtatagactttgatattatcttctccaaattgctcgatagctgctgcttctgaaagtcctaccgtcccaattacagggtgagtaaaaataactgaaggtacattatggtaatctaatttttcgttatctttatgattaaaaagtctttctgataagcgacgacctgctgcaattgctaccggtgtcaaggcaattttcccattaacatctccaatagcatacacgccatctacagaagtattctcaaattcatctgctttgatataacctttatcatttaaaacaatatcggtattttcaagtcccatgtctacatttggtccacggccgatagcccatattacacgatcaacgacaagcgttttcccattttcagcttcaaaaatcaacttgccaccttcatcgcgtttaagagatttaggtacatggttagcatgtaaagagatacctgatttctccatttcagccataacctcacttgttaccatgtcatcaaatccgcgtagaatatggtcttttctaaatgcaagatgggtttcaacgcctaattcattaaccactccagcaagttccgccgcgatatagcccgccccaacaatcaatatagaatctggtaaggtctcccatccaaaaaaatcatcagaagtctcaccaagttcacttccaataatatcagggtaaagagggtgtccacctgttgcaatagtaatgtgaggagctttatattgctgaccattcacttcaatagtatggttatcaataaaacgagcaaatccatcaatcttttcgactccattacgctcaaaattagcggcatacgactgtctagaccgctgcacgtaagcatcgcgattagcttttagagtagtaaaatcaaaattaagattattgacttcaaaaccataacctgaactatacttatggagtgtctcagaaacttgtgcaccataccacatgattttcttcggtacacaacctaagttaacacaagttccacctacttgtccaccttcaattaacaggacttttgctccatacatggctgccctattagcggtaccactgcctgcactacctccaccaataacgatataatcatattgttttgacattactctctccttgaatcattgatacctatactctatcacaaagtgtttacagtcacaattttctgctacgtagaatgcaaaaccaatataatgtgggcaatactagttcagtagactatcataaattgaaatattataaaagagaaaactcaaggagctctctcttttataatattacatcaagtcctgcatgggtgcaaagacaattttttcgatatcagacatatagacagacaaccgttgttgttggtcaaaataaacttttaaaaggtcattggattcaattttttccccaagtttagacatttcatcttgttcttcttgacttggcatttggccagattgcatcatttcttgaacttttgattgggtagccaaaaagtcttgccaaagcacttgtgcatccgcatcactttcaatagctgattttgcagttaaaactgcttggtattctggtaaagcacgaacagcacgttctaattcatttgctaaatcatatacattagccataagttactcctttttctacttgaacttaccactattttagacttttatacctttttttgcaattgaatactactagttttcatttaaaaatgatcaacataattgcgatatagttttacagcttcttttagttcatacatgttgtctgaagaaaatttttctagcacttctgtcaccaggacggtggctactacagcttccataacgacacctgcagccggaagtgccgtgggatcagaacgttccactgtagctctataaggctcgtgagtatcaatatcaactgacattagtggcttgtaaagcgtaggaattggtttcattactcccctaacgataataggctctccattagtcataccgccttcaaaaccgcctaaattatttgactgacgtatataaccttggtcctttgtccatgatatggagtccattacttgacttccttttaaaaaccctgacttaaaacctagaccaaattcaacacctttaaaagcattgatagatacaactgcttgcgctatcttagcatctaactttctatcccagtgtacataagagcctaaaccaacgggaactcctccaacgatagtttcaaccactcctccgatagtatctccagcctttttcacactgtcaatataatccttgatttcttgttcgaaggatggattgacgatagctacttgcgattgactagataacactttgatttgttgaactgttagcttatcagggacagtaatctccttgccaccaaaaactacaatatggttggcaatttcgataccaatttctttcaagatacgtttagcaatcgcaccaatagctactcgcattgtggtctcacgagccgaagaacgctctaaagcatttctcaaatcatcgaaacggtatttaattccacctactaaatctgcgtgcccaggtctaggatgcttaatacgacgtttttgctttaggcgctcttcaatgtcttcgactgacatgatgtccagccatttgctatgatccttattagttactgtcagtgtaataggtgaacccaaggtttttccatggcgcacaccagaactaatgatcacttgatcagtttcaattttcattcgattcccacgaccataaccaccttggcggcgttttaaatcttcattaatatctttagcagataatttcagtcccgcaggaatcccttcgataatagctgttaaactaggtccatgtgactcaccagcagttaaatatctcatctatttctccaaataatctctcatttcttctaaaggtatttggtggactgttgcactacctaattgaggcagtataacaattttaataaattgtccacttgcttttttatcatgactcaatatgtcaaataagacgtccttatcccattccgcatagtggaccggaaggccaaattttaaacacatattataaatatcttgactgatacctcttggcataagatttttacgctcagccacacgagaaagctggatcattccaattgcaacagcttctccatgcattatttctccatagccagcatgtacttcgatagcatgaccgatagtgtggccaaaattcaaatgcatccttaaccctttatcatattgatcagctaaaacatgctttcgtttaacttgacaagagtgataaataatagctaatgcattatcaaggatactatcaatagtcccatccatctcttctaaaatatgccagagttttatatcatcaatcaagccatatttgatgacttctcccataccttcaactaattcacgattgcccaatgtttttagagtaacaggatctatcagtacaccatcaggttgtgcaaaagtacctaccatatttttagcgaatgaagtgttgactcctgtttttccgccaatggaagaatcaacctgtgctgttaaactagttggaatttgaagaaaatggattccccgcatataagtagaagcaacaaacgctgctaaatctccgacgacgcctccaccaagtgcaatgatcccatcgcttctggtcatatgatgctttgctaaaaaagcataaatacgattagcaacttccaaagttttactagcttcacccgcagcaaaactaaaaacatgtactgtaaaaccttgtttttttaactggttgacaagcgactccccgtataatatttctacgttactatctgtgataatagttatcatttgtttctgccataaatgtgatacccagtcaccagcctcagaaaaacatccttcttcaattttaatatgataagggtgattcggtaagtcaacttcaacctgcattctaatgtcctctcatgtttgttttaataagacaaaaaccctaagcaattgctagggatctcatcagtatatttaacattttgttatctcgtatcagtcagcgtcaagcaatgctttgacacgcttcatctctgaaatagtaatttgtccgggtgcgatagatgaatctaaatatgcaaatgtccaactagatccagttacatcaccagcaaaacgagaaatacgtccaattttactcatagataccgtcgcataaacttgatcaggattaatagtcttgaaaccgcgagtgtaattcataacgtctaagacatcttgttcattctttggcattactgcgattttcacaactcgtggtgctagggctgttaattctgaaaatatctccataatattctccggtgtctcttgaaaattgtgataagacaggactaaatttggaaattctagcatttcttgaaaaacttctttatgtgaaaaatactcaaaatcaatataatctggattgtagatagaattaattttctggattaactcaacatactcagcatcagataagacaatattaccaccttcacgcgttgtacgaagagtaaaaataatttcatgacctgcgaatttctcaaaaatagctggagctacattaataatgtcatcctttggtaaggcatcagctcgccattcaataatatcaacactatcaaattttgataaatctatttcttgagcctcttcaagactgcgaggcattactggtactactattttcattattttacctttattgtaaatacttttaaataattactttgttggtccttatcatttatagtgaaatcttcaggcaactgctgtaagctaatgtaattatgtgaagctttaccaaaccccttttccaattgtttcttaaattgtgatacggttagattagctgcgttagttgatgcaatgatagttccaccaggggttaaaatatctaaagcttgttcaattaatttatagtaatctttagtaaccgaaaaagtttgttttttatttcgagcaaaacttggtggatcaataacaatcacatcatatgatagatgttttcttttggcatacttataatattcaaaaacatccataacgataaatcgatggttatctgtgacaatctgattagcatcaaagtgtgcttttgaaagttcacgcgagcgttttgctaaatcaacagaagttgtctctaatgctcctccaacagctgcagctacagaaaaagccgcagtgtatgaaaacatatttagaacttttttaccttctgatagattagttgctaaggcttttctgacatcatgttggtcaaggaaaatacctgtcattaatccatcattcaaaaagacactatatttgatattattttctaaaatcaaaaatgattcaggagcctcttgaccgtacaaatgagcactttcaaagtctaaacctttgaaacgaattttttcatatgcccctttaatattaggatagacctgcttaaaggctgcaacaatcatttgtcgattagtataaacaaattcattgtaccacgaaaaaagagcatagtcactataaaaatctatagttaggccaccaaagttatctccatcctgattaaacaagcggtaggctgttgtttggctagatttttcaaatttttgacgcttctctctagatttttcgaatagcgatacaaagtaatcatggttaaaatcaaaaacttgtcttgatagtaaccaaccaatacctttattttgtggtgaaagataggccatccctaagaattgatttgactgtgaaaaaagttgaaccaactggttaactaaactggtatcaaaatcttttttttccagtaactgagcacctgatttgatttttctttcaacgacagaattcactttaagtttattcataaacagtattataacaaatttttatcttttttcatactgaattcgacctttctttaccgtatgttacaaaattttatgttataatttaatctgagattttatctttaggaaaaaaattaaaggaagttcctactgtgaaaaaaattaaagattttgctagccgtgcgatcaatacacgactcggctttattttattgttagtagttatatattggttaaagacaatttgggcttaccatactgattttaatttaggtttagaaaattcctatcagttgtttttgaccattataaaccccatccccttaggactcttaatcataggtttggccttatatgttaagcgaaccaaagctttttatattaccgcttttatcacctatgctatcgtaaatatccttctaattgcaaacgcaatctactatagagagttttccgatttcattacagttagcgccgtcttggctagtagtaaaacttcggctggccttggagactctgctcttaatctattgagaatttgggatcttgtctacgttttcgatttcattatccttattttcttatttgcaaccaagaaaatccacttagatgatcgtccatttaataaacgtgctagtttttctatcacagctttgtctggtttactcttttcaattaacttattcttagctgaaattgatcgtccagaactactaagtcgtggtttttcaaacacctatattgttaaagctcttggcttgccatcattttcgatttatagtggtaatcaaacttatcaagcacagaaagaaagaaatggtgccactgcacaagaattagcgactgccaaaaaatatgtagcagagcattatgccaaacccaatccagaatattatggtatcggaaaagggcgaaacgttatcatgattcatttggagagttttcaacaattcttgattgactataaattaaatattgatggtaaagaacatgtggttactccatttattaacagcctttatcattcgaaagagactgtctccttctctaacttcttccatcaagtcaaagctggtaagacatccgatgctgagacactcatggaaaactcactttttggtctaagtagtggttcattcatggttaattatggtggtgaaaatacacaatttgctgctccacatatcttagctcaaaatggaggttacagtagtgcggtcttccacggaaacgtcggaacattttggaatagaaataatgcttacaaacagtggggttatgactacttctttgactctagctacttctcaaaacaaaccaaagataattcattccaatacggtttgaatgataaatatatgtttgctgactctatcaaatatctagagcacatgcaacaaccattttatactaaatttattacagtaagtaaccattacccttacacaagtttgaagggagagtctgacgaagagggattcccacttgcaaagactaacgatgaaacgattaacggttattttgccacagcaaactaccttgatacagctcttaaatcattttttgaatatctaaaagctgctggtgtgtatgataattctattattgtaatgtatggggatcactacggtatttctaatacacgcaatcctagcttagctgaattattaggtaaagaccctgaaacatggtctgaatacgacaacgctatgttacaacgtgttccatatatgattcacattcctggctattcaaaaggttttatcagtaatacatacggtggtgaggtagataatttaccaactttacttcatattctaggaatagatacgtctaaatatactcagttaggacaagacttattatctaaagataataaacaaatggtcgctatgagaacaactggtcagtatattactcctaaatacactaactatagtggacatctctattacactgattcaggacaagaaatcacaaatcctgatgaaacaactaaagctgaaataaaagctattcgagatgctactaataaacaattatctacaagtgattcgattcaaactggagatttactacgatttgatgaaaacaatggtttgaaaactgtagaagttgaaaaattcaattacacacattctcttaaagcactcaaagctaaagaacgtaaattgaaagatcgttcaacaagcatatacagcaaacataacaacaaatcaacagttgatctcttccatgctccaagttacttggaattgcaagatcctaataagacacataaaacatctaaaaaataatccttgccatttaaagtttaatccacacctcaatccaacgattgaggtgctttttatacggaataatactataaaacaataaaaatcaaaaaggaaaattataacaataataaatatatcgaaataaaacaaaaaagtttcattctacatatatagaacgaaacttttcactaaaattataatataggtactttctttctagtaattaaaaaaagttaggcaaacccaacttttttaattcttatttaccaagtttagctttagctgcatctgcaagagctgtgaaagctgctgcatcgttaactgctaaatcagcaagcattttacggttaacttcgatttcagctaatttcaaaccgtgcatcaattgtgaatatgataaaccattcatacgagcagccgcattgatacgagtgatccataatttacggaagtcacgttttttctgacgacggtcacggtatgcatagtagtaagaattcattacttgttcttttgcagtacggaacaagatatgttttgcaccatagtaacctttagctaatttaagtacgcgtttacgacgtttacgtgaaacaactccacctttaacacgagccatttatatttcctccaaataatcctttataatatgtagtaaatgtttacagagaccttattatttaaggcgagtaagcattgctttaatacgtttgaaatctcctgatgaaaccatagtagctttacgaagatgacgacgttgttttttagttttaccgtggaaacggtgtgaagtaaacgcgcggaagcgtttcaatccacctgaacctgtgcgtttaaagcgtttagctgatgcgcggtgtgttttttgttttggcattttaaattctcctcttaaataatactataaagtcgacaattatttcttgtctggaattggtgcaagctgcataaacatttggcgaccatccatcttagctctttgctcaataatagcgatatcttgtgtcgcttcagcaaattccgccaatacctttgctccaatttctttatgagtaatcatacgtcctttgaatcggatagaaactttaactttgttacctttttcaaggaacttacgaccgttacgaagttttgtttcaaaatcccctttatcaataactgggctaagacgaacttccttaacagtaacaacgctttgttttttacgttgttctttttgtttcttttgatactcaaatttgaacttaccatagtccataattttcgcaacaggtggtgtagcttgtggctgaattaaaactaaatcaacattagcatcatctgcaattgcttgagcttcagacaatggtttaatacctaattgttcaccctcgagaccaaccagacgaacttcacgaacgcgaatttcatcgttaatgaatagatcttttttagctatgatcttcacctctttatttttttagagaaaaacgaaagcggacttgataaatcaagcccgcacatataatcttcctagatggaatcttgacatgttgggccagacaacctaagtcgcaaggcgagaagttctcacttctgcttttctcattgcaactagtatatcatgactaattcttcatgtcaattattttttctgctttttcttgaataaaagttacaacaccttcaattgatactcctgtagtatcaaattcaatagcatcttctgctgcctttaatggtgaaacttctcgatggctatctttataatcacgagcagcaatttctgatttcagtgtttcaaaatcactctcaatgcctttttcttgattttctttaaagcgacgctcagctctttcatcaacagaagccactaaaaaaatcttcaattctgcatctggcaaaacaactgttcctatgtcacgaccatccattataatagcaccatctttggctatacgacgctgctggtttactaactcttctcgaatctctgggatagcagaaacccacgagacattgttagtaacatcgttttgacggatagctaaagtaacttcttctgtgccaagaaagactgtctggctgccatcttctgctttaccaaaagaaattggtctttcagctaggagtcctagaattttcgaaacatcttgtgcttcatatccatgctgtaaagccagataagtagcacaacgatacatagcacctgtatcaaggtaagtgtaattcaaatttttagcaataatcttagcgacagtactttttccacttgatgctggtccatcaatagcaatattaattgagttcataatcctccccttaatttacaaccacaggatcgcctggattagcataccaataccctgaggtcatatgactgggattaagttcttgtaaacgagcaactgagatacctgcacgagcagctatggaggctgctccctcacctggttgaactacgattgttccaccgtttactgaagatgatgtcgatgtctcactcgaacttgctacagtactagaagatgttgttgatttatcactagttttagtttttgatgatgacgttgttttcttacttgtagatgcttttttcgttttagaactattaactttttggcttgaagcaccataaaaaccagaagtttcttttgctctgtcttctcctctatttgaagtataaaatactataaataaaatagcaacgacaataacaaagaatgcactcaagaaagcggtaatccaaggagtacttgacaccacacctctactcgttcttgtaattttgtcttttctatgactattgttttccacaacttttttttcccatggttttttcgccatgacttcccccttgttaatcgtatcaataagtattacaataatactatgaaagttgcactaattccagaaaaatgtattgcctgcgggctttgccaaacatattcaaatatttttgattatcaagatgatggtatcgttaaattttccgatacagataacctagaaaaagaaattccaagttctgatcaagatactgttttagcagttaaatcatgtcccaccaaagctcttacgattttgtaagagcttttttatcgtagcgataacattcaaaataatccattttaatcaaattatcgagaagctccacttctcccttaaatgtaggttcaatagctagtgcatctaaaaaatattttttaggccattttcgcatgtaaaaaatacgctcatggttattattaaatttgatagtaacacttgatttagtgacctcaattttagcaatatcttcaattggaaacttagttcgtcttaaaaagttaaaagatacaatcctaagatatccgtcttcttcaataacaaaatagcgatgaaatccaatgcccactaaaacaataaagatggcaaatagaacaaatacctgactcggaatctcagttctttcatatagcagagataaaccaataaaaattggtgcaatggctattgaccaataaataatagcccaagaaagttcaggttgccagtgataacgtatcttcccaaataattttatcatttaaccactccaatctgatatttctttactaatccttagcaacgatgcctaaaataacatcaactgctttttccattgtttgtagactaacgaattcaaagcgtccatgcatgttttcaccacctgcaaaaagattaggagtagggattcccataaaggaaattttagagccatctgtaccaccacgaatcggttctatgattggcttgatgtctaactcttccattacttctttagcaatgttgataggtgtcatgtctttttcaataactttcttcatgttgtaatattgatcgtatagtttaacctttacacgttcagattgtaatgcttcattcatattatcagcgatatcttgagccaagtgcttacgctttaagaaatcaacttcctcaaaatctcgaatgatatatgaacttttagcttgatcaactgttccacttaaatcatataagtgataaaatccttgatagccatctgtttgttcaggacgttcattttctggtaattgactatgaaaatccatagcaagctgtaaagcattaatcatttgattttttgcagttccagggtgaacgtttcgtccttcaaatgtaagctccaaaccagctgcactaaaggtttcatactgtaattctcctagtggtccaccatccactgtataggcaaaatcaacatcaaaatctttaacatcaaatttatctgcacctataccaatttcttcgtctggtccaaagccaactctaatttcacaatgctcaatttctggatgcgaagccaaatattccatagctgtcatgatttctgctataccagacttatcgtctgctcccagtaaggttttaccatctgttgtaatcagtgtttgcccatggtaattatttaaatttggaaaatcttttggacttaaaatgtaacctgagtctccaagttcaatatctccacctttatagtcaacaatttgtggagtaatattttcagcattgaaatcagctgtatccatatgggatataaaacctattttatggcgtaagcggtcgcttgtagcaggtaaggttccaaccaaatacccattagaaggtaaataatgaacatcttttaaaccaattgcttccatttctggttttaaaactgttaaagcaaagtcaacttgactttgagttgttggcgtttgtgtactattaggattacttcttgtatttattttgacgtatgttaaaaatcgttctaaaagcttttcgtaagacatctttcacctcatatttctccatttaattataacataaaaataagctcactatattgtgactaccttaaaatttcacaaataattttggtcgtcaaaaaactaggttaaacaattctgtctaacctagtttttcattagttaaggtgcaactttcggcgtaagtcttgagcacgactaccaatcattttatcaagtagatgggtggccagtgccataaagccatatacccctaaacctattgcaccgataacgataatgtaaactagacttaccagtctactatcgggtacaataaccagattcattaaccatattatcatagaaataataaagctcatcaatagcgttagaataaggactaaagcacttgtacgacgaatagcttggcgtttaaatcctgtaatttcatgtattttcaaatacataagaattactgggatacaaagagctactgtcgttgagaaaagtggtccataggcatggaaaaggaaaatggagggaagttgtaaaataacttttgccaccagaccatataggaagtaaataatagctttacgattttcaaacaatgcttgtagcattggtgctaaaacagtataaatagataaaataattgtttgaataagagatatgacaaaaagtcctaaagcttgtccctgcggtaacccataaaagactgtatacaaaggttttgctaaaataacggatcctgcaacagctggcagtaaaaacattagtaacatttgtagattattaacaaccaaacgagcggcggcttttttatcattcttaacaaaattctctgttaacaatggaataccaactccagcaattgcggtagcaacagcaattagaatcatcgtaactttaccagggttgcttgaaaagtaagcaaacataacccgtaattcttcacttgaataattcgtaaagagcgccatcgtattcccaaatgaaaactgatcaatcagtttgaaaatttgaattgctgcaccagtaataataaaagggattgcttccttaatagtctcaattaggatttctttagtatctaatttaatgtgctttggagttttaccaatcaaggcagatagcatattataacgccataagaaataaagcagcacagctatactagcaaacataccgacaaaggcggcgaatgttgactgtgtcacagcggcaatataatctcctgatcctagacgcataatatagaaagcagttaataacatccatatgacacgtataatctgctcagcgacttgactaatggcatacggttttaaattattaaaaccttgaaaaaaaccacgtaaaacactcattgaaggaaaaactaaaacagctagagttagactacgcaatattggaacgagttcttgccctcctttactaagtgaagcaaatagaggtgaaccaatatacataattaatgcaaaaattccacctaaaatcagcataaactgcaagattttccgaaccagataaatgctcatctcttctttacctaaagtgttatacttagatacctgttttgcaactgctactggaattccaacagttgatatcaaaagaaataaagcatagatttcatatcccatcccaaataaagcatttgcttcggcagcatgctttcccatccaagcataccaagggataatatagatggctcccagcaagcgactaatgaaattccctgctgttaaccaagccgtccctttgaccatttgttcttgctgactaacttttgttgttttttgtgacatggtaaactttctattttcaatattatttagcatttaaaagacaaaaatctcagaaatatcactttattataaacttttaccttagacttgtaaaacgagaacataaagtctaaaataaggagtatgattacaatagataaaattttagaaattttaaaaaatgaccataatttcagagagattttgtttcatgagcattattattataactggacacaaaatgtaacttttaatgccttatcatatgatagtcgtcaaatttcatctgatactttatttttcgctaagggtgctacttttaaaaaagaatatctagattctgcaatcacagcaggcctttctttttacgtttctgagacagattacggcgccgatattccagtgatattagtcaatgatatcaaaaaagccatgagtttgatatctatgtctttctataataacccacaaaacaaacttaaacttctagcttttactggaacaaaaggaaaaacaactgcggcttactttgcttatcatatgttaaaagtaaaccatcgtcctgctatgctctcaactatgaacacaacattagatggtaaatctttctttaaatcacatctcacaacccccgagagtcttgatttatttcggatgatggctacagccgttgagaatcaaatgacacacttaattatggaagtatcaagccaagcatacctaaccaaacgtgtttatggtttaacctttgacgttggcgttttcttaaatattagtcccgatcatattggtcctatcgagcaccctacattcgaagattattttttccacaaacggctcttgatggagaatagcaatgctgttgttgtaaatagtcagatggatcattttaatattgtcaaagaacaggtcgaatatattcctcatgatttctatggagattattctgaaaatgttatcacagaatcaaaggccttttctttccatgtcaaaggaaagttggagaacacctacgatatcaagctgattggaaaattcaatcaagaaaatgctatcgcagctggacttgcttgtctccgacttggtgtttcaattgaagatataaaaaacggaattgcacaaactaccgtccctggccgcatggaagtcctaacacaaaccaacggcgcaaagattttcgttgactatgcccacaacggagacagtttgaagaaattattagctgttgttgaggaacaccaaaaaggggatattatattagtactcggagctcctggtaataaaggtcaaagccgtcgtaaagactttggagatgtcattaatcaacatcctaatctacaagtgatactcactgcagatgatcctaattttgaagatcccttagttatctcacaagaaatagcaagccatattaatcgtccggttactatcatcattgatcgagaagaagcaattgctaatgccagtactcttactaattgcaaactagatgcaattattatcgctggtaaaggagcagatgcttatcaaattatcaaaggaaatcgtgacaattactctggagatttagaagttgcgaaaaaataccttaaacgataaaaaaagctaaacaataatgattattgatactattttgaatcattccaaataattatcattttgttcacatttttcttaattaatgctaaaaaaggcttttgtaagtcttttttctatgttataatgaacttaattttttgctagaaaggttctctatgtctcacataaaagcagaaaacattatcgtatcttacgatcagaaagaaatcatcaataatctttccctcagtatacttaaccaaaaaataacaacgattattggtgccaatggatgtggaaagtctactcttttgaaggctctcacacgcatccataaaataaaagatggtactatcactattgatggtcatgatattgcacatttacccacaaaggaaattgctaagaagattgcacttctcccacaggtgttagaagcaactgaagggataacagtttatgaactaatatcttatggacggttcccacaccaaaaataccttggcaatttgacaaatgacgatcgcagtaaaatccattgggcgatggaaatgactaacgtagcgcaatttgctaatagagatgttgatgacctttcaggaggtcagaggcaaaaagtatggattgctatggctttagcacaagatacagatactatctttttagacgaacctacaacttatcttgacatgaatcatcaattagaagtcttagaattgctcaaaaaacttaatgacgaaacgcaaaaaacaattattatggtcctacacgacctaaacctgtctgcgcgctattctgattatctagttgcaatgaaaaccggtaaaattatctatgaaggtagtcctagtcagatcatgactaaagatattatcaaagatatttttaagattgatgctcatatcattcaggaccctattagtaaacaacctgttttgttatcttatcaattatcaactgatcaaaattaatattatttaggagatgttatcttatgaaaaaaattggaattattgtcctcacactactgaccttctttttggtatcttgcggacaacaaactaaacaagaaagcactaaaacaactatttctaaaatgcctaaaattgaaggcttcacctattatggaaaaattcctgaaaatccgaaaaaagtaattaattttacatattcttacactgggtatttattaaaactaggtgttaatgtttcaagttacagtttagacttagaaaaagatagccccgtttttggtaaacaactgaaagaagctaaaaaattaactgctgatgatacagaagctattgccgcacaaaaacctgatttaatcatggttttcgatcaagatccaaacatcaatactctgaaaaaaattgcaccaactttagttattaaatatggtgcacaaaattatttagatatgatgccagccttggggaaagtattcggtaaagaaaaagaagctaatcagtgggttagccaatggaaaactaaaactctcgctgtcaaaaaagatttacaccatatcttaaagcctaacactacttttactattatggatttttatgataaaaatatctatttatatggtaataattttggacgcggtggagaactaatctatgattcactaggttatgctgccccagaaaaagtcaaaaaagatgtctttaaaaaagggtggtttaccgtttcgcaagaagcaatcggtgattacgttggagattatgcccttgttaatataaacaaaacgactaaaaaagcagcttcatcacttaaagaaagtgatgtctggaagaatttaccagctgtcaaaaaagggcacatcatagaaagtaactacgacgtgttttatttctctgaccctctatctttagaagctcaattaaaatcatttacaaaggctatcaaagaaaatacaaattaaaagaaagctcctcttatgtttaaagcttcaaaaaaactcgttcaaaaaaataagtcaaatcatttttggcttgtttttttcataacacttatactatttcttattggttgttacgccagcttacgatttggtgctatcaatttcaagactagtgatttaataactgttttaaaaaatcccttaaaaaactctaatgctcaggatgttatttttgacattagactaccacgcataattgcagctatcttagtaggtgcagctatgtcacaagcaggtgctattatgcagggagtcactcgaaacgccattgctgatcctggactactaggtattaacgccggagctgggttagcccttgttgtagcatatgcttttttagggagcatgcactatagtacgattctcatagtctgcttactagggtctgtcatttcttgtcttttagtcttcacactctcttatacaaagcaaaagggttaccaccaactacgactcattttagccggagcgatgatctccacactttttacgtctgttggacaagtggttacattatactttaaactcaatcgaactgttatcggttggcaagcaggtggtttatcccaaattaactggaaaatgctaatcataatagcacctatcattattttaggtttacttatttcacaactcctagcacatcaattaactatcttgagccttaatgaatctgtggccaaagcattgggacaaaaaactcaattaatgactgcgtttctattacttattgttttgtttttatcagcttcatcagtcgctttgataggaaccgtttctttcattggattgattattccacattttattaagctttttattcccaaagattatcgtctgttattacctttaataggattttcaggggctactttcatgatctgggtagacttatcatctcgtattataaatcccccttcagagacatcaattagttctataatcagtatcgtagggcttccatgtttcctatggttaattagaaaagggaaaaatctatgattcaaaaaaataaagctccttttgttttaatatcatctgtcattatcctactattattaatactagtatcaatttcacttggctatgctaatacttccgttattgacgttttaaaactaataagtggaaaatctgatgatgccttcctttttatcattactaacattcgtttacctcgtattattgtctgtatctttgggggagcttctttaggaattgctgggttgctattacagacgttaaccaaaaatccactagctgattccggtattcttggtatcaatgctggagctggattagtaatcgctctaaccataggaacatttaatgttagcaatccaactatattatactttttacccctatttgctatgtttggagggttggtaactatttttcttatctatcttatgtcatacagaagaaatcacaatattagccctacacgattaatcgtcactggtatcggaatatctacaattatttcaggcgttatgattttgattattagtcagtctaataatcaaaaaatggatatgatcgttgaatggcttagtggaaaaattacaattagttcctggactaccattatcacttttatcccgattctcattttgttatggggattagcatatagtcgcagtcgccaccttaatattatgaacctaaacgagcagactgctctcgctctaggacttcatttaaaaaaggaaagaatatatactttgatgctgacaagtagcctcgctgctattagcgtcgtcttaattggtaatattacttttataggcttactcgctgggcacttaagtagacgactattaggaaataaccataaaattatactacctagctgtcttcttattggtgctattatcctattggtatcagatactataggtcgtctcctcttagttggtacgggtattcccactggattggttgtatcaataattggtgccccctattttctctggttgatgacaaaagttgactaaaaaagactggacaaacttccagtcttttttatgttaagtaaatctttaaagcttcaacatcaagtttagcatttaaacgataggtagtatcttggtttaagctaatatatccaagtaattctaaagcttggataaaaataactgtacgtttttgcttaacactatccttgcgaagaaatttcaatataaagcttgacatatattttaaagcatattccgaattaacatctcctaaaagttgataaagctttttttgttctcttgaaagtggataaccgttagttagtttatagaaataattagaaagagtcaaagtgtttctttcaaaatctgtctcttctacaaataccaagtgattggttgggttatctaaatttgtcacaaattttcgcttctgtaataactgatagatttgactatcagaatctatgaaaaccaaatcatctaatactaatccatctagcgaactcagaaaaggaagattaaggctgtagcgtttattttggcgaaggatatatccatgattaatatattcttctaacaaacggtcaattttagaatagtctgtaaagtgggactttatttttcttagtgttacatcatcatgtatccaaagatagttaataagctccttaaaaaactcttgtctttctaactttcctggattaaacgttaatatcataaaagcgctcctaaatgtatgactaaaaaaacgggacgcagcccgttttacatgattaattaagcattgtagctttctgtcaattgaggaacaacttgttttttgcgtgatactgccccagcaagaaaagcgtggttattttcaagtgtaaattcaaaagctgcttcaactttagccatatttgaaccgagagctaaaatctctgaatttgaattaacaatgtcagtaatcatcaatacaaaatcagaataaccttctgtgacaattgcttcttgaatagcaacttcaatctcttcttgacgtgctaaaatatcgttaatgtccacagtattaacttgtgcaacacgaacagcttctccatttaattcaaatgttttagcatcaatatcaatcaactccgctgcagtcttacttgagaggttagtacctgctttaagcatttctaaaccatattcttctaagtttacacctgcaagctctgctagttcttttgcaactggaatatctgaagcatgagttgttggtgatttcaaaagaagagtatctgaaatcaaacctgataataataaaccagccaactctttgggtactgatactccattttccttaaacatacggtaaacaatcgatgatgctgagccaactggttccaaacgcatatataacggattggcagtctcaaagttagcaacacgatgatgatcaacaacaccataaactgtcacatctttaatatcagaaatagattgttggaattcgttatggtcagttaaaatgactgtctctacaccctctgcttttgcagattctactactcgaggtgcttgaacaccaaaataatctaaaacatatgctgtttcttcatttggagttcctaaagcaacggcctctgtgtcaagcccccaagcttctttagctagatatgcaaaagcaactgatgatccaatagcatctgaatctggattttggtgaccaaagactaaaattttagacatgtttttacctcttcttttatattcaccttattgtagcaaaaattgaataacttagcaaaaaatcttactaggaagccctttgcaactaaaaaagttgaataaaattcaacttaaaactaattttgaatcctttttagatattctgtataggattctgttttcatgatatctttagcgtttttaacacgttctggagttggtggtttcacaccagctaatggatacggaattcctaattcacgccatttgaactctcccatagtatgataaggcaatacttcaaatttatcgacattatcaagtgtttggacaaattcacccaaacgttttaaatggtcatcaatatcagtcaatccaggaactaaaacatgacgaatccataccggagtacctctatcagataaatatctagcaaactgtaaaatatttttgttagactgacgagttacaattttatgttgttctgaatcaatttcttttaagtcaaggagtaccaaatcagtaacatctaacaatttttcaaggatagcatggtattctggtgttgctcgataagcaaaaccacaagtatctagcgtcgtatgaatacctagtttcttagcctcaataaagagggctgtaataaagtcaatttgcagcattgcttcaccacctgaaactgtgatacctccatcttttccccaaaaatgtttataacggagagcttcctttagaacatcctcaacggtacgttcctttgaattgttagtttccatttcccaagtatcaggattatgacagtattgacaacgcattttacatccttgcataaaaatgataaaacgaatacctggcccatccacagagccgaaactttctgtagaatggatcattcctgttacttttttatagtctatttctgccatttcatcaccttgtaaccgtttttatgactttattatatcattttcatgaaaaaaagactaagtaatcttagtctttttcaatattctgttctatatcagacaatagcaccttcaattttgttatacgaccatctttaactttatcattaatcaaagtgatgtgtttatctttgctgtctacttcgtaagctactttttcctcttggtttggaatactacccacaccagttaaataataacccgcaattgtatcaacatcatcactttctaactctgtctcaaaataatcattaaattcattaagcgtcatagttcctagaacaatatagatattctcatcgatttccctgacaaattgttcagctgtatctgtttcatcatcaatttcgccgacaatttcttccaataaatcctctagagttactaaaccagcaacgccaccatattcatctagtaaaatggccatttgattttgagtgttgcgtaatgcttttaaaaggtcatctacaaaaatcgtttctggaacaaaaagaggttcctgaagtatttttcgcaagtcgatagtatcaaaaccagttttaaagcccgcttccaataagcgcttggtatgtaaaacaccaacaactctatctttatcgtcatcaaaaacagggacacgagaaaagttttgtgataaaattccttcaatatttgattgtgcatcattgttgatgtcaatcatgaaagcatcagtgcgcggaaccataacttcacgcgccatcatttcatctagcgagaaaatcccttgcagcatctcaatttcttcagcttccaaagtttcttcactattcgtcaacatatattcaatttcatcacgtgtcatcttctcgtcagcatcatcaaaagtcatcggagtgattctactcaataagttagttgaagctgagagcaaccatacaaaggggcttacgattttccctagaaagataataatgggagctgaaacaattgctagacgatctttcaaattcatagcaatacgcttaggatataattctcctagaacaatagagacatatgttaaaaagattagcgcaataatactccctgctgtacgggctgttgctgaatttcctagccaccctgaaatcacatgtcctagtgaggcagataaactagccccttgcaaaaggctaataaaagtaataccaacttgaattgttgataaaaaattattgggattttcaagaacgtccaaaagacgtcgataccttttgtccccttcttcagctttctgttctactttagagcggtttagcgatactaaagccatttcagatgctgaaaagaaggcgttaaatagggttaatattaataaaataacaaattgtagtaacaaactctgactgccagggtcttgcatggaaaattactcctaaataaaaattatttgaatttagctgatagcgattaactctaccaactgttcttctattagataatgctatcattatatcatataatagcactgagcgcatagtcgataatattgtttatggcattttatagaaattatcattttagctaattgcctaaagatagttacacctcattttcatatgattgtaacttttctaccataattaaaaagggaggcgtattaacttgattgagtggttgataaagcattgtagcgaaattattctgtggtaattgttccacgaatgctatcaccgcatctttctcactttttccaccatcatgaccataataaaccataagtgatagacgtccacctacttctaaaatgtctaaaacgtttttgattgccttgatagttgtgtgtggttttgtaataactgttttatccgctgagggtaagtatcccagattaaatatagccgctcttaaaggtgtatgaacatattgttccaaattttcatgcccatccaagataagttcagcgttagagatcccttgctccgtgagctttgctttcgtttttgctattgcttcttcttgaatatcaaatgcataaacttttttagaacttttcgctaaaaaaacagtatcattcccatttcccatagttgcatcaagcgttattgcttctttatcaataacttctgctaaaaaatcatgagaaagatgaattggtcttttaatcatgttttacctcagctttacatccttgatatgactgtcttttctccatttctttgtcaatggcattaagcacttcccatttattaaggctccacatcggtccaattaacatatgacgtggcgcatcaccagtaattcggtgaataacaatatgttttggaataatctccagttggtcacaaataatcgaaatatagtcttcttgacttaacaaacgtaaacgaccttcatggtaatctctctgcattcttgtattagtcataagatgcagaaggtgtaattttataccctgaatatcattatccgtaacacatcgacgaacattttccaccatcatatcatgtgtctcccctggaaggccatttattaggtgagaaacgatttctactttaggagctaattctcgtattctcttaacagtttttttgtaaaggtcatatgaatgtgctctatttattaatgcagaagttgcttcataagttgtctgaaggcctaattctaaagtcacatgcattctttcagaaagttcagcgagatagtatatagtttcatcaggtaagcaatccggccttgttccgatgttgattccgataactcctggctcattaatagcctgttcgtaacgctctttaattatctctaacttagcatgggtattggtaaaattttgaaaatagactaagtatttattaacctcaggccactttctatgcatgaaatcaatttctttatagaattgttcacgaataggagcttctggagcaactatagcatcccctgaaccagaaactgtgcaaaaagtgcaccctcctctagcaactgttccgtctctgttaggacagtcaaaaccagcatctataggtaatttaaatattttttctccaaagagttctcgataataatcattaatcgcacgataacgttttttcataggataattgtatcacaattttaactaaaataacctcactactacaataaaactaaaaaagattggaacgtcagttagtcccaatcttttatttacttcactttctttaaccaatccttggctaaaaagatatacgcagttagattcaaaataccataagcaagtataaaaccagctaaaacatctgtcggaaaatgaacccctaggtaaatacgagataacccaattaaaaaaatgagcaaacccaaagtaccttggcacaacagtttccatatactcttaggcatatagtactgcaataaaataataatactcccaaatatcataaatgttcccatcgagtgcccactgggaaacgaatagccacctgcaaatactaaatgggttaaagttggtcttactctttgaaaaataagttttaaagaaagtatacatataccagagataatagcatttactgcgataaatctagcttgaggataccacttcttaaggtaacagaaagtgacgctcataatcgcaatagctatctggcttacagtattaccaatcacagtgattaacttgaaaaatcttgtagaaagatttggcaactgtcctctaacactttcttgaatagtttggtcaaatgaaattacagtgtcgggccaatatttgatgaccaatcctaaactgaaaaataagataatagcaataaatgcttgaataagtttactattttgacgagataacattagtctttttatatctttctaatattggcaaacaagccacgtaagttagatagaaaacaatcgaaattaaaattccctcaacgatattaaatggaataaccattgttaaaaggtaattgcctacaccaataaatgttctgatatcaaagttagcaaatatagcatacaaaggaatcgcaaagacatagttgagagctaccatagatacggtcaagctaactgtaccaaatagactagctttaataaaatcttttgcactctctctatttttccagaaaatagcgaaacttgctaaaaataaagctagagcaaccatattcatcggtaaaccaataaacgtttctggaccacgattagcaagtataacttttaaaagtgatcttaataagagtacaccataacttgatttcaaatcaaataaaataaaagcaactaacatcggaaggattgaaaaatcaacctttaaaaattctgctcctggtattaatggaaatgaaaccatcatcaatacaaaagataaggcagaaagaatggcgattgtcaccattttacgtgtatttgtcataaaaaaattcctccaatttaaataaattgaaagaagctccaaaggtaagcgtatgtacgcgaaaaaacctttgtcttctcccatccagactttactgtcggttgtggaatctcaccacatcagctttcgctcgcggactgatgcttcacaactgacaaataagttggaagcgattaccgccggtcgggaattacaccctgccctgaagacacctatagcataacaaaaaaaacttgcaattgcaagttttttaattactaattagtagtagtgattaaaaatcatattaataccaaattactatactgtatcgtttctttcagatttgctatttttagtttttcttaaaaagataaacaaaattcccaaaataatacaaccaagaattgtcagtcctccaccaataatcattcctgttttaggaagaaatgattgtggaaaaagcggttgtgatggtttaggatttgttggtggaggagtttctttttcgttttctacctctacttcctgtgttttattagcaactacagcaactacagcatccttcatagatatacggtaaccagttagtgcttttgcttctcgaaaaatatacttaccaggtaataaaccttcaacctcaatttctcccttatcatcagttactaatgaagtaatcccatcttgatcggtcgtaaatcgtccatttttaaagcgaactggctgattctggttatcgtataatacaaatattactccggatagccttttctttatctttccttcttttgtatatttaataagttttaatcggcctgtttcaacttttcgcttaggatttatctgtaattgatttgataacttatcatctggtaattcaatataaaaaggtactattgttgaaacgctttgatcagctttataagcacgaccaaagtacgaaccatttgggagtgctatctttgtctgaccattagtatcagtaggagaagtcaagatactcttatacttctggttcaattcgctatctgtcatttggctcaataaatcaacttttaagttgtcagtcacagtccataaacgataagaaatcccctcctctgtagtatttggctgaagtcctatctgtgtgattgttagttgattaggggtatcagcatttacactggctaccgaaaaaaacgctaattgtaccaatcctaaaaagcaacatagtagaagtcctaaactttttctaatctttttcatttttgatttccctttctctttctctctttaaattttcgttttaaatataatagtaaagcgactaatataagaataactaggattgataagaggaaataaagtttatagtgtgtttgcaattctttcattaaatagttcttttctttaacaggaggtacatacttgattcgatgccctctaactagtaaacgatgtgaattaatcgaataaggtgtacatgttagcaaagtcgcataatccttacctttaacaaccaataatttagaaaaattatctggctttacaacacttatttgatcaaccttataggctaaaacttctttgatattatgaatataaaaaatttttccttttttaagtttatctaaatctgtaaataacttagctttaggtaagccgcgatgagctgtgataacagtatgtgaactttttccaccaattggcaaggaggttccttcaaggtgtcctgctcctttttcaagaacactactggtagtccccgcatagataggtaatttttgcttgatagacggtatatcaatatatccaatcatttcagcaatctcaagcatgtgggcgtattcagcaataccttttttttctttttcagtatagggatctgataggcggcttgggtccagtgttctattataagcttttgctaactcaaatcgtctattaatctctttagtatttaatttttgggtttgattatcaaagttagttacttgattattagctttaatattatagtaccaatttgaaataaaaggatatgaggttatcaaaagaccaactaagaacaatagtatcaagcctacattcatccatcgatttaaaacgaccgatttcttaaggtttttctgaaattttcctcccattatgattcaattccttttctaacacttgctaaacgatttttttgacgttgacgttttattaaccaaagtaaccaagcaataataactaaagatatatagaatagatatctataaatcgtgtttaaatgaccgtcttttattaatttttcatcaataggacctttataagggatacgatgtccccttactaaaagtctgtgtgtattgatcataatcggggtgcaagtcaataaggttgcataatcatgtccaggaacaaccaacaaatctgaaaagttatcgggtgtaacgacttttatctgatctacttgatatgctatcgtttcttttatgttttgaatataaaacttatctcctttttttaactttttaaggttagaaaagagttctttatctggaattcctgaatgcgctgttataacagtatgtgtactattgcccccaattggaagagaggtaccttctaaatgccctgctcctttagatagaacttcttgacttgaacctgcaaatatagggagtttttgacctatcttaggaactgaaattgttccgattttttcacttacctctaacatacgggcgtactctgctacccccttttgaattcgttttttctcataaggatcttcaagatggacattatttaaagaatcattataagcttgtgctagagccatacgtcgattgatttctttctgactaagttttttagcagctctctcaaaatcctgtgtttgattattagattctatcgtatagtaaaaacgtgataccactggatacaataaaatagatagacctattagaaaaagaatgataaaaggaagatttgacttcttctttttttttgtttttttgatgatttttttagtcttcacgtcatctcctagataatggctcttgcttatgatctaagagtacttctactgaaatacccttagatcataagcacagctttaactgcgcttatacatcatcaaagactagccttaagcttcctttgattggcgtcttttcatgataactactgctccaagcataatgcttaaaccaataattgtgaaaagaattgtaccaataccacctgtttgtgggattgttacctttttattttctacacgtgtcgcatctttttggttgctgttagcaacgtagtcaatgttaccacctgttatgtatgacccttgattaactacaaacttaatattacctgccaacttagcaaatcctgctggagcaagtgtttcttcaaggttgtaagtaccgtctgcaagacctgtaacttcaaattgaccttgatcgtttgaagtgtaggtaatggctctagccttatctgttatccactcataagctgtacgagcctcaatgaaggctgcatcgtaatctgcttgtttagttttgataagttcttttgcagtaattcctttttcacctttttggtctgttgcagacaacttgttataagcagcgatagcttcatctaaagctattttcttagcagctaaagttttttgaccttctgattgatctgctttaagagcaaggtatttacctgctgagtttttcacaacgaattgtgcaccagccaaacggtcaccttgttcattagttttgacaaatttcttaccatgagtttcaacttttggttcagttgggttcaatggtgttgggttatcagaatctttggtattggtaatggttactttaccattttctagatttattgcacttccgtaaccagaaacacgttctgagatcatgtatgatttgttttctagaccagtgaatttacccgagaagttaccagatacttcaaatttgataccatttccaaggtcgattgtacctttagatgtttttgtcaatgatactgaagcaacagttttatctttatctttcaatgtgtaaacaacgtttacaccatcaggtgcaattccgtcagaccaagttttagcaactgttacttcaccctttgaaggtgtaacaggaagttcagtcaagtctttacctggtttgttaccatacgacaatttgatatcattggattctggattatcaataattgcttgaccattaacagtagcactataagtcaatgtaaattcaatatcagctgttttagctgctttttccaatttgcccaatccatcagctgtgaattttaatgtgaaaccacgggcatcaatgctaagttcatagtctgtatccttagcaaaagtttctgtagttcctgaagctttaaggctaacagttgaacccattgtcaaaccatttgacattatatctgtccaaaccaagttttcgtatttagaacctttgtgaatttttgttttaacttcataaggaacaactttaccgatttcagcagtagcagttgctttgtcacgtgcataattaccataatttgcgccagctgtcaaaagtctattaacatctgtcaatgctgtcaaatcgtttgttttagcaaagtttttatcaatttctggtttttcttcagtgttctttggataaacatgggcatcagcaacaacaccatcttcatttaccaatggaagagtgatgttaactggaaccgcttttgaagcagccaggagggaaccattattgttgtaagtagattttgatttaacttcaacaattttaaactcgcctttcaatcctttggtgttgaaaacaagtccagtatctccctctggtgtcaatccagacacggcctcatcaatatttactgttatttcaggagtaccatctttattaattaaggctggtgttaatttgttaccttcttttgccttaacatattgcactttaccacttttatcttctttcaaagctaaagcaaagaacgcaccttcgatttctttagatccctcgccaaagtaaccagcaaggtcagaaatagctccacctttgtagtcttttccgttaagacctgtagttcctgggaagttacttttgttaagatttgattcggtttgcaaaatcttgtgcaaagtcactgtattagttgttgcttcatccgcaaacgctggtgcaactgagagcaatgacgttaaagtcagtaacaatgccgagaacattgcaaaatatttgttgattcttttcatttctatctccttcttattttagttaatcaacatgattaataatatgcggattttaatacaccgcagcaccactcccttcaagtcatggaattttagttaattaattaagaatactaaagcgcataatttttaatcttttttgatggacatatcactagatttcttataccttttccaaatataaattccacctgcaatagacatcatagctccacctattaaaatgaaagatagaattcctttcccacctgtcataggaataattccttttggtggaatatgcgtgttggtaattaaatgcttgtcaccttcctcatgatattcagaaatctgtttattaacagctattatattttttatcgatcctttaaccacttcaaaagttaaaattggtttattagtaattttttgataatcctccggcgaaactgcttctattaactgatatttgccatctttcaaatctttgtaagaaattttgccgttttctcccgtcactacttttgaattattattttttattggtaaataaagtttataatcttcattaaattcttgaagttcaaacgtagctcctttgagaagcaacttattattatctttatcaacttttataaattcaatttcacctaacttcttctcgtttttaatcgttattgtaggatattctctcacatcacgaattttagggattggaaaatctctaagtgtattaggatcctctgacttaggattcaatgttgttctaccattagtgtcatagaatttgttacttataaaactgtcatctagtttcacatcatatgtgagtgttactttttgaccttctcctaaattcaaacctctaacatagagtttatttccgatgtattctaatttaacccccttaagtattccaccatcattattaggcccaccagttgcaataccatccttcattacacttccatcatttccctgtaaagtataatcacttggctgtaatgtttgtccattaccaagctgtaaattgattttatcacccataggatcttcgatagttccattaacaattgagttttcttttgttaaaatcgtttcaaattgttgctgaattttagataaaatttcattgttagatgtatcggctgaagttacgataggggtgtagtactcaggtttggaagagaacgacctcattagttctgtgatttctccatctgaaagtttaaaagcttcctctttcaatttttgaaaagtaccatcttgatttttcttatactcctcattataaacttgtctaaaaccagatatatcgataccaaaattaaaaatgtcataatttttctgttttaaactatttatataaagtttggttggtgttccatgttctttcactggtccatttcgataaattgtacctttagggtaattaagatttaaatctaaataatgaagtttttgtaagtttccagagattatctgtgtttgataactatctaagggaaacaaaaagtaactctccccatttccttttatatcctcgggcttatcagtaagtagaaaattacttttatttagatatccattttttttcatttgttcaaattggctttcatatgatgcacccagtttaaaattattaatagcatatgatctcgtaggaacaccatcagttacatgaacaataattttttgactatttcgatttacttgactcaaaatatcatctgcctccatgaaggctttcatagtaaatgtttctcctactttactaagatagtactccttttgttgctctggagttaatccattggtagtagatccccacttagctttaggagcttctgtcggaatcctttttataatctcttcagcattatttgttaattgtttatgactataattctctgtctgaattgtgaacttagtttgaaggccataatatttatcatcttctttaaatccttttacgacatctacactcctaccatcaaaaatatctgaaccataggtaactaatgcaaccctattatcactgtttgctcctaaaatatcttttactgcggtcccaagagcttcggcagctttcttggctttattatgcctttgaaaatttgggccatcgttattcattgagttagaattatcgagtacgaagacaacatctaacggcttttgtttgtccactggttttactatggtttttccactgacagttaactcaattttatatttattatgagctaaatcacctacttctgaaatacgtttagataatgttccctctggaatttctcttatatgctcaccttcacttgaatatgggttaactgcttttgcctctgactttccatttggaactgaacctttaacatgctcaagtttataagattcctttgtatcttcataaattcctgtggggggatactgcttatctagttcttcctgattttgtccaattgtggaatttttatcaccactattttgtatcgtagtttttccattactctcaaccttaacttgccaagtctggttagtctttttataaccttcgggcgctgtttcttctgataaagtataatctccaggtatgagattatcaaaagtagcttcacctgttagctcagcagttactttttctattttactttctggatgagcagtagtttttaaaacaaaggtagcttttgaaagtggtttgttctggtcatctgtctttttaacaactaactttcctttagcaccattttccggtacggtactttcccctaaaacattggtattaagcggtatttgcgacaaacaaaaaagacttaacgtcaatattttagaaaatttttggtattttctcattttacaactcctattgtgccgaaatgtcgtttctaaatctaagatcagatacagaatatcctagaatatacaaactatcacttattatgatatcaataatttcttattataaggtatggaattttaatgttttttcccaatttttgaataatttttctttttatttgataatcttattttttattatcttagaaatatttcaatgagcttaagtagttgatttttctttttttatgttttaaaatattgcttaaaaataatgtttgagagagtttactgaattgattgaaaattatttagaaaaagacatccttaatcaaataaaacttctaactttatgctatgattactacccttccattactctagacaaatcatgtcatcaacttggtttatctgaactacttattaggaaatattgtcatgatttaacaactttatttaacagtcaactctctctgaatatcgaaaagagtacaatagtctaccaatctaatggtgtaactagagaacaagctttcaaatatatttatcatcaatcacacgttttacaacttttaaaatttttgatcacgaatgattcaggcaggttacctttaacttactttagtgaaaaatttggactatcttgtgcaactgcttatcgcatacgaaaacatattagtccattactagaaaaacttggatttcagattgtcaaaaatactattaccggtgacgagtatcgaattcgctatttaatcgcatttttaaatgctcaatttggtatagaagtttatcccatgtctaagatggataaattgctcatcaaacgattgttattagaacactcaactacttttactgcttctcattacttcccaaatacatttattttctttgatacattgttgtctctatcatggaaacgtattaattataatgtagttgtcccttactcatcccttttcactgaactacaaaatatatttatctatgatacattacaatattgtgtcaaaaatgttattatagattcctttaaaattaatttaaaaaaagacgatatagactatatttttcttgcttaccttacttcccataactctttttctaatccaaattggactgagaagcgtatcgataatgtaatagctattttcgaaaattatcccaaattccaaaaattattacagccactcaaagatgctcttcccttatctggctcctatcatgatgagttggtaaaagttgctatctttttttccgaacatttattttaggattaaatcaattaatccctgaaacaatttcatttccttcatggaactatcatagacatgataaattaactactattctccgaccgataattacaaattggttaagtaaaattggagaatacacgtttaaagaacaacattttcttctcctttgtactcatctagaaagaatcatcaaaaatcatattcctccgatacagatagccgtactaactacagactttattaataaccaaattttaacagaatgcttattacagagattttcttctaaaaagattcatttccacccttactatttattaactgatgatctttccaatattactaatcttaatccagacattattattaccaataaaaagctttctccctttatcaaacatgagatttcttcagagagtttaattacatatattgatctgattaatacttcagaccaaatcaatcaaatccaaaaaattatttcatcaatacaggaagaaaaatattgcaaactttttgcaaaaactaatgaaataactaatcgtagctcctataactcttaaaaattaacattaaaaagctagagcattgtgtaatgctctagctttttaatgttaatttttttgaataatataatccaacttttcaactgttttttcccatgtgaaatgttctttaattcttttagcaatattctgttgtagtttctctcttaatgccttatcttttactaataaatcaagagattcatggagtgactgagtattttcttccatgatgattcctaactcagggctatcaataacttcaactgttccaccgcgatctgttgcaataatagcacttgaaagtagaccagcttctaaaatagaggttggtaatccctctggatacattgaagggtaaacaaagatatcagtctgtgccattaaagacatagtctgttcaaagtttaatttccccaaaaagttaatctgtttggactgatatttctctttcaaatgtgctaattcaggtccgtctcctgcaatctgtaaataaacattttcagagtactgtgacatcgaaaatgcttctaagagcaattcaatgcctttttctttaataattctaccagcataagtgatgaaaatatcatcagcagatttttcaaggtaagccgtaccagcaaaatcagagcctagactttcagataccgaattataaataactcctttagcttctatattaaaatgttttaaccattcaacgcttctcttggataccgcataaaaatctggacgataatgcttaacacgcgctgtgagaagatgttcatagatagctccaaagaaatctaaaaaacgattattgacagaaaaatgacttgacccatggtctaaaacaatactaggtaaatggtgattctttgcaaaagatagcccttctagcgttgttaactgaaaacgtgtattacaaatcacaaaatcaatattttcatctgaaacatatttcatcagcgtgttgtattctcgatttttgttaataataggatagcgctgcttgacaatatttttggtcggtaaacggtaaatttttctacccttgtcttcatctataatcggtaaatcaccatgattagttgttacaataacaacacggtagccacgcttaaccaaatctgctgtcattttatctgtataacgttcaatacctccgaggaagggtagataatatcctgagaaaacagcaactgtttttaccttattttccatatttatccactttcatcaataagccatcttttaagcctttaatcatagcaactatttttttgctcttttgctcttctgctaccaacactcgaacaaattcatttcgcataaatactaaatatttgtatcgcttcttcttaccatatttttttataatatagatcgcattgcgtatcatgtaatattttcgaaatggtgaatgattcaatacatgaaaaacatggccaaattttttaactcgtgaagagtgtccaatttcgtgtaacagaccaataaaattaacctgataagtcttatatcccatctctgacagacgataattcatttcagagtcaacaaaatcaataaacatctcttctgcaaagccagatgtttcttcgaaaacgctcgttttcattaaagcagccgaagtaatacactcttcaatttctttatagtcaaattcttgcatcactaaattttcacggttcatatcttgatacaaacaagataacataccgaccttaggtaaatgaaggtaattttcataattatctatcaaatcacctaggacaaccgaatcttgatctaaagtcaagaaccaatcaaattcttgtgctactgcaaattgaccgatacagttcaaagcatatgcaatccctttattttctgttaaataatcaacagttaggtgcccctcttcattataatcggctactaattgagaaatttcttccttatttttcgagccattatctacgatatagatgtggcttacttgaggataaattgctcgaatgttctgatctaagcgttcaatattggggttaaaggtgacaatacccgctaaatatttcatgttctatgctcttttctaaaatctctaaataactgaatgactggtgctttggttataaaaacgataccgacatagatagttactgctactaaactttgaatgacataatttaccaatgatactgacatttgagtattgatataatagagtacagctccactaagagtagcagcaattaaatagcgcagcattcctcttgttaattctttaaaagtaaatacatctcttaaagagatagcttgatatagggagacaataaattcagtaataactgtagagataatagctcccatagcacctaaaattggtattaaaagtatattaagcacaacatttgccacaagtccaataactgcagacattgtgtaagcttttgtacgtcttgaagccagtagatactgtgtccctaaagcgttaccataagaaatgcaaatgatcatcaaagactcaacagccattagcggaccgacagcttcataccctttcccaaaaaagaagacggcaaatgtcgacgaaactcctaccactcccgcaatcattaacattgagatagcattgcttaaatcaacaagtttcaaaagtaaagccttagcttgcttttcttttcctgaagaaaatagactggagagccttggtaagaaaactcctccgattgctgaaacaatggtaaataaaatacgaataattttatcagattgatcaaaatatccagcactgaccacactatccattgctcccagcatactcttgttaagagagagataaatctgcatggtgatttggggtaaaaataacattaaagttggtcttagatgtattaagatatctaatctactaaatggtatcttgatgatttcatgctttaaatgatgccagactgttaaatttccgagtaatgatgcaaatgcaattaaaaacatataaagtgctaggtcatctggcgtcttcacaactaagaaggtcaaaacaactgtaataagcttaacaatggtattacgaatgacaattatcttaaagtcttcaactccaataaaataccacgaaatatcagttgcagtcgctaataaattaataccttgaattaaatagaataattgccattcgtttgtaagtaagacaaatccaaagaataataacgttgctatagatacagaggcaagttttaatacaactaattcccaaaatatcttacttctcttatacttatttgactgcacaaaagctatctcacgattaccgtacaaagatatccctaaagcaccaaataaagtaaagtacatgacaatggagctcgtataggcattaataccgatgccttgaggagatagtacacgggaaacataaggaactgttactaaaggtaacaacaaagtcaataactggtatgaggtattataaaacatatttttcaaaagtttcattagtttctcctcataattaaactaataacagtatcaaataacaataaggcatttgatacaattaccaagccagttaacgcatacggcaccactttccttcctgcctcatttagacgcgctggaatacttgatgcaaaaacttgtaccaaaagcaatgtaacagtaaagtaacgtccttgaactccttcaatgtagcttgttggcgctccacgatattctaacatgataaaaaagacaccaagaattcccacaaagaaactagctaagaaaagaaatcccatattttttgacttaacaaatttttcttcagaaaaccatactagaaagaccatgagataccatactgatgatacccaagtgggaataaaattctgacttggatatggagaggcaagccaggaagtaatgtcattacttaaaatattgataccagcataattatagccaaatgtcattacataacgtcttaaaacagcaaggacaccaccatgtcttgcggtcagaacataaactatagcaagtgacaaaaaggttagacatagccaaaatagctttttagatttaagaccttgaaataaatgtgatagcttctgattatagcccattaatttaggattgttaacctgcaataataccggtattactagcaataaaaacagccagtaattctgcttacatgcaacaatgactaaaagaatcaatcctataagagcaatactaagatttttagtcaacgatttatcaactaaaagatttatcaaaagcgataaaaatgctccaaatacaatatatccagtcgagtcataagatagactagcaaatgaatttagaactacgggactgaggaaaatagcaaagtagattaactttccttttttcacataccggataatgagggcaaccaaggtgattgagacaaaggaactaaataaccttgctactgtaatcattacccccatagaaggatacacaaatttgcctaaaaataagccaactgctggcacaagatgaccccaaaaaacaaagttatgtttagaatagtttatctcacgaggcaaatgattaccatcaacaaaattggctttatttaaatagtatttttcaaatctagtaccatctctataggaggtcgattgtcgtctcatacctgaatcaatattatattctccatagtaagaagtatcaataatgttatttgaaatacgaccagacacagctaaatggtattgtccatcaggttcattgaaaaatggcattaataggctcaatacaatagtaatcgttaagcctaatataaaatatgttttatgcaagttcttgtctagaaaaaacttttcaaatagacgaacttttttgaggttcatattaactcctttttatatcttttaataaaaacaccaagtcacgaatgcgatttgaaaagctatcatagaaccgttttttagtcatcatttgtttaagtattgctacaaaatctttattttgagcatttttataacgttgctgattaaaatccagataagctttagcttcccttaattgactagagctacttttttctaaaaatggtacaaggatgatatagtaactcaaaacaaaatacagttcttgtaaatgcctttcgtaacttgagctcatattcaagatattcccacttgcattctcagcatgtcgcttatgttcaccaacacttctgtttaaattgtaacctgaaccaatgacaccagatacccctgcaaaaagattatcatgtgacaaaattaaattatcactgtaaaaagtcattacttgatcaacaaacgacttgcgtaaacaaaaagtccaaccttgacgatagttatgatatgaaaagtctaatggatacttagaaattgtttcctcaccattgaacttaaaattattgggaatagtagcctcttctgataactttttgatatcaatatcggcgctaagaaggtttatatcttggcgttcttccataatatcaacttgcatcttatttttatgatgataccatgtgtcatcttgatcactaaaaaagacatagtcaacctcataggctaacacatcaataagtaattgacgaaaatttaaacgccaacctaaatttttatcattactagttattgaccaaccatctaaacggtgctcttttatatagtcttcaaccacctttacagtatcatcagtagagccatcgtccctcattaagacatagtctggtctcaacgtttgatttctaattgaatctagctgatcgtggatgaaaccttgaccattatatgttgccatcaaaactgctgtttttaccatattattccttactttttaaacgcaaataataaatctctcatacgtccactattagagttatagagtcgccaatttttaatcacaaaagcactattatgaattaatgacaatttagaagcttccaatctttctttttcaaaggctaagcgttgatttaaagcgacatcattttgatatttgttgacaaccttctgcatggtttcgtaaaaatcaacaaatgtttttaatcctgtgatatgttgtgttttaggcgacttccaattcaaaacaaatttgctattaccacttgcgtttcctccatatcgaatatgaactcctacgctttcgttaaggttataaccatttccaataatactggcagttgtctcgataagattatcgtgcgaaatattagctccaaaagtccaattatcagcgatagcttgcgcaaaatctctcttcatagcaatggtccatccgggacggaatgtttgataatcatatactttaggatactgactgattctatcactagaagaaaaagttagaaaatgtggaacactggcttctgtagacatcgttttgatatcaacgtctgcactcaaaacctcaatttgaggtttatctgacataatggcaaactgtcgttcgtttttatcaagataccaaatatcatcttgatcactaaaaaagacatagtcaacctcataggctaacacatcaataagtaattgacgaaaatttaaacgccagcctaagtttttgtcgtttttaacaattttccagccttctaactcatgttttgcgatatagttattgacgacattgactgtttcatccgttgaacaatcatccctcaataatacataatctggttttaatgtctgttggcgaattgaatcaagttgttcagatataaatatttcgccattgtatgtcgccattaaaactgctgtctttaccatattactcctcaaatgcttgtactgtttttaatattccagattcaagagaaacttctcgcttccatcccaacgcttctaatttggccatagtgagacgtgttctccccattttgctataacctgcactcatagttttaggaatatcgaatactactgaaatatttttatcagaaaagagatcaactaacttttgtgccaaatccttaatcataatgggttgatcttcatttgctacattgtaagcttgaccaacttcaccatttaataaaatagtaaataaccctgatacagcatctgctaaataacagaaagcacgctctgctgtaccactactttttaaaacgatatctttgccatcaatgacattcgataaaagatcattcataatacgaccatcgttaccaagctccataccaggaccaaatgaatgtgcaatacgagcaatagtaaagggtaccttatattgatcatagtaactttgcagtagagtttcagccatacgtttgctttctgggtaacaagctctagtagctaaaatatcaaatccaccataagcttcttcatcaatcacttctttaatagatgttccatatacttcacgcgttgataagaacaagaagttttcaattgttttttcctttgcaaagtctaataaattcaatgtaccaattgtattagcttttatgatgctaacaggattactcaaaatagcagttggactagcattgcttgctgcatggataatgtaatccacttttccatcatactctaggcgttcttctacatcataaggaattaaggtgaaataatctttcccaactaaatctgaaaatttatcacgggctttttcaatgtttctagctgtcgcaataatttgcgtttggtaatttcttgtctcattgagataggctagtaaaaataccatataactcgctaacatactattagaaccacttattaaaacgcctttattagcaattctttcccaattaatataattttggttactaataagtgctaaatcttcttgtacaattttattactaaatttaatcatcattacatcccataaatttgttcattttctctagcatcatacaaagctttaaacatataaaaatcatctggtgttgttatcttgatattttcatatggtccctcaacaatagtgagttcacgattgtacatacccatcaaagtactagaatcaattgcatcagtaatccctttgctaatggcatcacgttcaacagaaaggatatctgatagataaaaactttgtggcgctttagcaatgaaggaacgagtacgatcaacaacttcagatattttagaagaatcattgactagaacaactgtctctttagcacgaactgaagttaccgcacttcctgtttcttttactgactgtatattagcattaataacttcttcattaatcaatggacgtactccgtcatgaattaaaacaacggcatcatctgtagccagctgttcagcggcttcaagccccttaaaaattgacatttggccagtttctccacctgcaacaactgcttttactttcgtaaggttgaaacgctctaccagattattcatataatctagccagtctgatacacagacaactactacagcatcaatagcttctgtattttggaaaatatcaattgtgtgtacaataatgggtttaccatgcacttctaggaattgctttggtttacctttggtattcatgcgacgaccaacaccacctgcaaaaataactccaatattcatcattaaccttctttccagtaccaagtgtaataactatgactttctctcttactttctggaggtaattccatataactacccccatataattgattcagataagcatgctcatttttaatttttcgggttttaatgttttcaaacataacatcttcatactcagaaaaaatttctcttggaaaatattctttcaagcgatatcttgaatcggtataacccatgtaaggaacctcttgattattatatgtttccatcacttgatcaacaatttcagcacgttttttagcttggccgtgataagcgatgaatcggggtagccccaaaattagccttgcatttgcataaagctttcgggaaccgctagcaaaattggggtaagtcgtacacatcaaatttgcagcagcagagtgaacttttttaaagaatctttgacgttcttctgcactctctggtaatcggtcaagtgggaagatatcaataaaaatccctgtccaaggatgaattctatctgttttacttaagtacattgactttgtgtgatacagcttggcaaatggccatagatttttttcaacagaatgatgtagcaatttaaaatcgctattattagcatcagctaatgctttcatcaaacgctcatactggcttctttctagcatcaaatcaatatcgtcatcccatggaatgaatcctttatgtctcattgctcccagtaggctgcctccgcctaaagaatattcaattttattatcacgcgcaactttatcaatataagctaacatttcaagttgaacttctcttatttctgagaccgtcatttctttcataattacctctgtctaacagttaactcacattcttttaaatacaaatcttatagctgtaatatagaaaataaataaagctactgcaaaaagaatcactagggtcatgggtttgaaagttttctttgttttttgaccttttggagtgtttgcaagtgcattgtattcttgtttgttgtactgcatgtccattatataaccatttatattatagttaccaaattgtgctttagaaacactatctttatttactgtaaaataaaatggtttattgctttgtaagtagccttttggagattttgtctgtattaagaaatacttatatttattagacaaacctcgtaatttaaataatgattggttacttttcacttgttttttatagttataagcccataacctaggattcaagtctatgtcatttgaatagccatcaatacctataatgttatttcctctaatatggtaagcattttggttaagatattctttatttaaactcttaatcgttttttgagtatttatccaaaagccattaggttgatatagagatacttttttatctgcattcaatcttcctaaaatatactctgaaccttgtaataatctattttgattgtcgtcatacatggcaaaatttataccataactgctcaaactaggtgtctttatatagcctttagaatcctcgacaaaaatcccttgatcttgtttttgattatcaacagaaattagactccgtttagtctctatgacgcctttcttttcctgagcaacagacaaattataatctctttttgaagcaacatgtcctgtaatctctaactctttaatatcagcatttgtcaaatcaaagtctaacttatcaatagagtgaagtttatacaggctattttgtaataattctttttgctctgtttcatcaccactactatttaaaacaattttatcaccatcgacactaatactgctatctattggatacaaacgtccctctttaccttcttccgcaataataggcgcttgagaaagtcggtaattataattagtactatctactacaaaattagggctaactctgacagtcagctgctttgaataaattggaatcctataagtaatacgtttaccgtattcaactcctatagtatctctttttttgttattaacagttactcgaggattatctactcgggtattaccaagataaatcgtttcgtttttctgaatatttttcaacacatattcttgagtttctgcgctgttttcaaaagcagttaaaccaactggaatattaccaattgcttttcctttgttatttgtgaacttataacgtttattttctggattatataaaacacttggctcttctaagccattcatgtaaattaaataatctttattcttttcaagcagtaaccttacaatagcaatagcatcctgtctagtattttttataccagaaccaaatctatagttattatccataaggacttttttaccactaacttggtacttccgcttgatactatcaaaagtatagtgtgtaaagtctttgctctcaaactcccccgtcctcactttatccaatgctgtttgtaaatgaatagcattaatctgaacactgtattgcggggtattattatgataataataagctgtaatatctacttttttatctgtttttacttttttattattttggcaacctactaaaaaaagcatgaaaaacagacaaataaaaatatgttttttactcatctaaagtgctatcctctatctcttttttcaacaaagaaacctcttgaatcaggcgtttaatttgctcatctcttttggtattgctactagtatcaaataattctaaacaaaacagaaataaaatagcaccaaataacaagaaattcatcgttaaagcgaatccaaggtgatgagcgataaatgagaccaccccaggaaatacactaataaagactagaattaaaccaactaatagccaaggtaaagaacgtttaacagaaaatgtgtttttattaaccattcttataatcatataaagtaggacaatggctaaaataaacatttcaatttgcaatgctaaactcatttatcatcctccttaataaaccctgcaataataattgatgttaaaacatccgtcatataaaaaatcgattttagggaacttatacttgaagtacctgcctcacgttcaaacatattagctgtgacttccttcaaacgatagccttttttcaaaatccgagcagttgattcaggctctgggtattgtactggataatgacacgataaataagctattagcgccgcgttggctgccctataaccacttgttgtatcatagactttgtgtcccgtcgttaattttatagcagcagatattaaatttatgccaagacgcctcattgctgtcgattgaaaattttgatgttttttatcaacaaagcgagaaccaataacaaaatctgcttcgtcatttaagattggcataacaacatcttcaatgcttctaatatcatgttgaccatcaccatcaaattgaacggcaacatcgtaatgattacgattagcgtataagtatcctgtctgcacacagccaccaatacctagattttgaacaaggtcaatatgatttaaacccaatctatctaataactctggagtaccatcggttgacccatcgttaataacaatataatccagctcaaaaggtagtgagcgagacgccttaaaatctacaatagtctggactgtctttgcaatactaccttcttcattataagcaggtatcactagtaaaatttttttcatcatcttatctcttattgtaataatttgttgcaatcaaccatttaaacacaacttgatgcttaaattgatttttgctataaccatatttccataaccaccttaatcttgtcataaaaggctgtttgtcaatttttataaaacatttaatgagctcaagatcattagctgtcataatatcaccatacttatcaacaattaaggaagcttgcttttgtgagtcatggataagtttccaataccttgtaaatatagatttaggaccttcacgaagtatcttaaatctcttatccattgtcctcgcccccaaaacattattgtcatgttgacggtatagttgagttggtaaatccaaataaatgatttctcctaaacttgctgctaagagtgctaaaaaccaatcatgcattaagatatcattaggagtaaaccacttctcagctaatgcatgatttatcatcatagtcccaccagtaacagtattctcagttagttctggtaataatgtcgtattggcatggtgcgattgagcccgaatcatgctgtcttgtaaaatatttaattcttgattaacaactttcaaatcagtataaacaagtaatggtacatcagatgctttatgctttgctgcctctaaacttacagataacttttctggcaaccatacatcatcttgatcactaaaaaaatagaaatctgcaacttcgtaattaactagcgtaaaaaatgatttaataactcctaaattatggtgctcattttcattaatgaaacgaattcgagaatctttagcagtaaagtttctaataatatcacatgtcttgtcacttgaaccatcatctctgattaggaggttccactctttaaaggtttgcttttggatactttcgatttgctgcgccagaaacttctctccattgtaggtggccattaaaatattaactttcatttaaaaacaaatcctcatattcttcaacaatttttttccaagtatagttttcttgaataatggcttttgctcgatcaccgtaagtagataaatcctgttgttgatcactatcgttaataagcttagctaaatccccctcttttttagcccagtaaaaacttgagagacctgctactgatttgttgaaatcaacatctagaacaagattcaaatcagtattagctaaagcctcaagcagtcctggattagtaccgccaacttcatgcccatgaatataagcaaaggcttgttgacgaacataatccagcagatctttttcatagagcgtacctacaaacttaactcttttatcttgttgaaggtttgtctttaaggacaacttttcaaagtaggggttattttgatggttacagataataactaaatcacgcttagtatctgaagccatgaactccctaatagccgtttcataattgttttcagggacaaatcgaccaacgattagatagtaacccttagacttaatattccattttttaaacaactgtttgacacgtggatcatctgacgataatttcctagaattaatctctgtaccgtaagcaatgaaccttgtcttcacattagagtaggtagattgaatgtaattttcaataccaatattatcagaaataattaggtctgcatttttagtcatacatttttcggcgtattttaaataacgctgtgtgggacgagaccactttgatcgcttccactctaaaccatccggattaacatacaataagccaccgactttatgtattttattggcaaaatgccaaataaaggcaccaattgtatttcctaaaatataaaaaataggctcttttaaatcatgtgtcttaaccaagtcaagggcataattaatggccataatatcataagcaatcacacgtgctggccctaattggggaggatttatagtaaaacaatcagcgtcagcaaagttaaaatgagtatgatgttctttatcactaaggcatgcaacatggtattttatgtcgaaacttttttgatgattaatcaattctgaaacaaaagtttcaaaaccaccgtaacgagctggcaaccctctacttcctataatgaaaacatcttgcatcatcttctccattctagctaaacaatccatacaattataccataaattagaaaagttagctaaaaagagcagtaagctaaaaggattctctagccttactactctttgttttgatcttattttttaacttcctgcttgtagaactcttttaaagcatcttgccaagtaggaatcacaaatcctgttgctttcgctttttccaaactcatagttgaatttaaaggacgttttgcttttgctgggaattgactagaatcaacaggcttaacctccacatctgtgtcttttaagatttcaaccgcaaaatcataccatgttgtatcttctttagcatcatttgataaatgatagtaaccaaaatctttttgattttcagctaaataagtcataaactcagccaaagtacgtgtccatgttggtcgtccatgttggtcgttaacaacagttagagttttgtgtgtttttgcaaggttttgcatcgtaaagacaaagtttttaccatagttaccaaatacccacgctgtgcgaatggtatagaattttgaagtatatttttcaactaactcttcacccatacgttttgtacgaccgtactctgttttgggatcaggcagatcatctacttcccattcttgccccactggtttttcaccatcaaacacgtagtccgtcgaaatgtaaacaagtgttgcatcatgtttagcagcagccttagcgacattctctgtaccagtgacattgattgcaaagtctagctcttttccttcatcttctgccgcatcaacagctgtgtaagctgcacaatggtaaactaaagatggcttcacctcttcaaagactttgtccaccatctcggcatttgtaatatccatttcagctacatcaacagcaacatactcttgagttcgttcgtctaaaaggtgacgtaattcactacctaattgcccgtttgcccctgtaattaaaatcattccttgctcctttaaaaataagtttaacttttaattcttcgtttattgtacactaaaaaagggaatatttcatccctttactctttatcttatgaacgaattcccaaagcgatacgagcataacgactcatcttatcaacagaccaggctgggtaccataccaatttcacctcggtttcagttacctctgggactgttttcataacatcatgaatttgatctgtcaataaatctgctaacgggcatcccatagtcgttaaagtcatatcaatttcagttcgaccgttatcttcaaagcgaatctcataaattaacccaaggttaacaatatctattcccaattcaggatcgataaccatctccaaagcttctaggatacgatcttttatttttccaacttcttcttcgctatattgctttacttctgacattataatacctctctgaaaatattaataccgtctttaagataactcctttgcaaatcatttttattagaaactaaacttcctattctaaaaacgattatcgagaagcaatcaatcttccatgaaatctttaagttgcttgctacgactaggatggcgaagttttctaagggctttagcttcaatctgacgaatgcgctcacgagtaacattaaatactttacctacgtcctctaacgtacgcattttaccatcgtcaagaccaaagcgtaaacgaagaacattctcttcacggtcagtaagagtatctaaaacctcatctaattgctcacgaagaacaacacgtgtagtataatctactggattttcaataacttcgtcttcaatgaaatcacccaaatggctatcatcttcctcaccgattggcgtttctagcgataccggctcttgagcaatttttaggatttcacgtactttatctggtgtcatatccatgcgttctgcgatttgctcaggagttggatcttgaccaagttcttgaagaagattacgttgttcacggaccaatttattaatcgtttcaaccatatgaacaggaatacgaatcgtacgtgcttgatctgcaattgcacgtgttatagcttgacgaatccaccatgttgcataagttgaaaatttgaatccctttgaataatcaaatttatcaacagctttcatgagccccatgttaccctcttgaattaaatcaagaaattgcattccacgtccaacataacgttttgcaattgagacaacaagacgaaggtttgcttcagctaaacgttgtttagccattaaatctccctcagcaaccgcaacagccaattctttttcttcttcattcgttaaaagaggaacaacaccaatttccttcaagtacatacgtactgggtcattgactttagcagaattacttcctatgagctcttcatcagtcaattcttcaggttttggcccttctaccacatactttgttgaaggattgccttctttatctgtgattgaaatgccaccgtctgtcaatcgttctaacaaatcatcaatttgatctgcatctaaaacaaaaggaataacaagtttttctgttacctcatcatcaattgcagtaccttgttttttatgattgcgaataaaatccgcaacttgaacattaaaagttgtatttccttttttctctgccataggttcctcattccatatttcttttttgagcaattaaattttctaatgcagccaaggctccttcttcatcaccttgattactagattgtctaattaactggctttgttttcttaaatcacgttctttcaataaacggtcacgtgccttttcgacggcttcaatctctccaatagatacttctacaggtaattgttcctctaaaattatataataagtacgattaactttgtcactttcttgtgataaatcataagacgtgatctcaccactttcttttagcaactcatataaaacttgtatttctgttgtatcaaaataaaaattatccctattacggaattcatttaacaggtagggatgattcaataatcgatgaaacaattgcatttctgttttagtgatagctgataacttacctgtctgtggtaattgcactgtagcacttgtttgtactgaagatgaagcttgctgttgacttctatgatgcaatcgttcgttattaaccgattgttctacttgaaaataatcaaaatctggcaagagttcagccacttttgtaatatatgaattttgtgctgttatcgatggagatttagcaattaatttcgctattttttcaacataagcaatttcagattgtaaattatcggtgttttcaggctttaagtagtggatataaaactctgtattactgatgcgcccattttctaagagttgtttaaaatcttctgctgaatttgcttgtagaaattcatcagggtccattttattaggtatcctaacgatatcaacagtcatatctgatagcagttctaaagacttgtcaattgcgttttgaccagctctatcaccatcataagtcagaacaactttcttagtaaatcttttaaggtgtctaacatgttcattggttaaagcggtccccatagaagcaacaacattctcaattcctgcacgataagctgcaataacatccataaagccttccattaggtaaacttcgtgtgctttattaattacagcacgcgctttatctaaatggtaaagctcgtaagacttattaaaaataggggtggcacgagaatttttatatttagcttgttttctatcaatgtcctcttgagtccaaactcgtcctgaaaacgcaatgacttcaccaatatcattagttaacggaaacataattctattattaaatgaatcgtaaaactgattgctattttctgaataattgaacaaaccagaagacatcaaagttttttcatcaaactcttttgccagacgacgatatagaaaatcctgccctcccggcgataatcctatttgaaaatgtttaattaagtcctctgtcactccgcgctcggcaaggtattgtctagcgcgttcaccatcattagttgtcattaaataggcatggtaaaatcccgaagcaactctatgaatatctaaaagcgactgattagctttaggttttttaggaacttgccccttaaaattagtatctagaggtattcctgaacgttcagctagaacttgtacactatctaaaaaactaatatgttggtaatcttccacaaatttaaagacatcaccagagcgaccacaaccaaaacaatgaaaaaactgcctatcttcgataacattaaaagatggcgttttttctttatgaaatgggcataaaccaagatgattgcgtcctgtttttgtcaaaccgacaacttcaccgatgacatcaacaatgttaacactgttcttgatttcagaaattttttctttatcaattgccaagtcatgacctccacagaaataacccattatagttttacatttgattatatcattttttcttttctgtgtaaattttttcaaaagctttttcaaggatttcttcttcactgatttaatataaaaatttacagataatttgaaacctattacttggatttctcaaaagaaatctgctataatgaacgtgaattaaataatattaaggagcttgttcacatgattaaagaactaaaagaatttttatttaagggtaatgttttagaccttgctgttgctgttattttaggtgcagcttttaatgctatcatcacttcacttgttaaagacgttattacaccgcttatccttaatcctgtattaaaagctgctggcgtttcaaatatcgcacagctttcatggaatggtgttgcttacggtaatttcttaagtgcagttattaatttcttaatcgttggtactactttattcttcatcgttaaagctgctaacaaggttatggctaagaaacctgctgaagaagaaattattgaagttgttgaaccaacacaagagcaattacttgctgaaatccgcgacttactcgctaacaaataataaaagactcggattaccgagtttttttattaacttatagttataatatatgaaaaaacagctcaattctgaactgttttttcatattctatctaattagaattttttacgtttgcgagctgcttctgatttacgtttacgttttacagaaggtttttcgtagaattcacgtttacgtgattcttgaagagtaccagctttagtcacagaacgtttgaaacgacgaagtgcatcgtcaagtgattcgtttttacgtactactgtttttgacatatgtttcacctcctcaagatattgtaacattttcacgttcacttactaggatacccaaataaaagcagattgtcaatatttttatgatactttctctgggttattatttccctatacgtgatttcaatttttccacaaaaaggtatgccgctggacaagtaagagtattttttatcgttaagttattaatttgatagattttcttacgatcagtatgtggaaattcacgacaagctttaggtctgacatcgtatatactacataagttatcatcgcctaaaaacggacaaggcatcgctttaaatactttatctccatcttcatctacttctaaaaataaatcttcaaaagccgataacttcatccggaaatgtttagaaatcctagaaatatcagcttctgtaaatagaggacccaaagttttacaacaattagcacatgctgtacaatcaatttcttgaaaaacctcttgatgtatctgttggactattttatctaagtttttaggagctttcttttttaaacttgctaaaaatttacgatgctcgccttgtttttggagcgccaaatctttatatttttcaatattaattgaaccctgaaccatatattcctctgcctttatgctattattcttagtcaagccatattataacatccaaaaaagcctatgactaggctttttaatattattcaacttgattgccagttaatttagccgcatctgaaatataaactttatatttatcttctttttcaagtctctttatcactttgttaacagtcttcaacatttttccactgtctttaggtaaagctacagccttagcatccccttctcctgttttaagggcaaacttagcaagaacaaggtctggattctgggccaagtaaccttcagctacggttttttctaaatcaacagcttctaccttgcctgattttaactcactaatcgcttctcccatcgctgtcagtgacacgacgtgagaatttttgaatgatttcttagaaactccctcttcgatacttcctttttgtactgctatttttttacctttaaggctttcgattgaagtatattttcctaaatcagacttcctaacaagaaccgcattttctgtagtgtaataaggttttgaaaaatcatagactttagcacgctctttagtatatgataatccagaaatagccatatcagccttacctgtttgtaaacttgataaaacattgtcaaaactcataggagatacctctagtttgacatgaagctcatcagcaatagcttgagctaactcaatatctgcgccgacaactttatctttcccattaacaagcgctttaaactcaaagggagcataatctggactcaccgctaaaactaacttcccttttttctcaactttatcttgtagctgtttgtctgatgaaccacacgccaccaaagtaacgacagataaaagagataaaattcctaatattattttttttgacataaactatcttccttttattatgataggaacaagtataaatcatctttatacataagtcaagtttttttgaataaaaattcagtaaattacaccgataactatgcttgctgttagacgatttttaataacaactataactaattaaaacaatcaccttttaaaagtattccaattcttaaaaaatgctaactatcattaataatcaactaactttcagaaccttgtacagttgctgtctagtaagaaaatgataataattcgatttagtcactctccttgctaaaataataaataaggttgagatgtacatctcaaccttatttattattttctaaaaatcgctttagatatgatataggtcattataattgacaaaagaattgtggtagctaatgctaacagttgaactggcatatgtgataatttaaagagaccaactcctaaacttcccaacaatcccccaataccattcattccaaaggaggaaacgacatcatcaatggcaaaagctttcgcaacgtaatccgttacaaagtaggtgaagagggatgcaaagaatgttacagctaataattgccaagttaagagatacccaactcctgctgtactcgtcacaagaccaacaataatgccattcaataagcttcctgttttctcttcctcaccattccacttagcagccaatgtccacgccaaaccaccacctataatagcaaatatagtatttaaaagtatcataatggcttgtgaattccactcaccaactggacccatattaaatccaaaccaaccaaatgtaataagtatcattcctaaaaagagactatcatttttaaccttattgtgctgatgttcactcttgccaataacatgagctaaaatatacgaagaaagccctgcagataaatgaacgatcattccgcctgaaaaatcaagtactcccatctttgcaaaaacaccctctgaattccaaattaaataagctaagggcgtatacaccaagaaaagccaagaaacaacagctaataaaagtcgcttcgtctgaactctatcaataattgacccaataagcattactactgcgtaaagggcgaaacaaagttgaaataaacaatttacaatttgtttaccatctgcttcttggaattgaaagacagttttaaaatgaccttcaaatgctaaaaaataggcacccatgaaccaagctgttgtcgttagcaaaacagtaagtacaaactgataaataatccttgaagtcaatgattgatgtagcgacccaaagtaatagaatgcaaccccaaaaatcatgagccacatcgataaaatacataatagtaaaaacacaaatagtcctttctttacaaacactcttttatttgttaaactgtattattgttaactggttaagtattttatcttacacatttatttttgtcaaggagaagacatgaaacattatcaaaccataattatcggtgcaggcgctgcaggaatcggttttggttctgccatgcaacgattaggacttacaaattttcttatcattgaaaaagggcacattggagaatcttttttaagatggcccagaacaacacaatttatcacaccttccttcactaccaatggctttggttttccagatctaaacgctgttattccagatacttctcctgctttctcatttgaaaaagaacatctttctggagtggaatatgcacgctacttacaattagttgctgctcattataatctccctatccaaaacgaaacatctgttctatctattgataaacgagatagcctttttgttattaaaacttcaaagggagatttttctgctgattatcttattatggcaacaggagaatttcaaaatccaaataccattgatattaaaggtgcagatctaggaatgcactatggtcaagttgataatttccatatcaaatctgacaatccatttatcatcattggtggaaacgaaagtgcttgtgatgcactaacacatctagtatatttgggaaatcaagtcgaattatatacagatacgtttggtcgtaaagagagcaatcccgatccaagcatctctttatcccccctaactaaagaacgtttaaaacatatacaagaccacaaaaaagaatattatagtatctctgaaggcaagaaagccattgagattaaacaaattggaaaacaatatcaagttacttttgatgacggtagtactgcggagtctttccataaacctattctttccacaggttttctaaatacctgtcatctcattgacggaatcgctttatttgaatacgataaaaatcagttgccaatagttactgaagatgacgaatctactatcgttaataactgtttcttaattggtccaagcttacgacaaagagatactattttctgctatatttataaattcagacagcgctttgtccctgttattaatcatatcgcacaacgagaagggattatattagacgaagatacccttgaattctttaaagaaaatcaaatgtaccttgataacctagcttgttgcgatgtcaattgtgattgctaaaaaatcgctagctttattgctagcgattttttaatattaaacatttgctacttgaggtaaggattctccaatagcttctaaacgttctgcccattcttgacgtgataaaccattttcttgcacatagcgattacgttcatgtgcacgacattcaggcgagcaccctcgaacatacttcgcttcgttttcttctgaagcaaaaatttgtttgttacaaaacggatttgcacaattgacataacgttcacaaggtgttccatcaaaataatctttactaataacagttggattaacatgattaattggcaccgagatacgatcatcaaaaacatacatcgcaccatcccaaagttcaccttgaacttccggatcttttccatatgttgcaataccaccgtgtaattgtccaacatctttaaaaccttctcgaaccatccaacccgagaatttctcacaacgaacaccaccggtacagtacacaacaacacgtttttccataaacttatctttgttgtcacgtacccattgtggtaactcacggaaattgcgaatatcaggacgaattgctccacggaagtgacctaagtcatactcataatcattacgcgtatctaaaacaacagtatcttcatcaagcaaggcttctttaaattgtttaggatttaaatactcacctgttgtttccaaaggattaatatcgctatcaaagttattatcttctaacccaaggtgcacaatctctttcttataacgaacaaacattttacggaaagcttgttgattttcctcgtcaatcttgaaccaaagatcagcaaaacgctcatcgctgtggacccaatccatatacttctgagttgtttcataatctccagaaacagttccattaatcccctcatccgcaatcaaaatacgacctttaagcccaatagatttacaaaattctagatgtttcgcagcgtactcttccgcattttcaattgaaacatatttataatagagtaaaactctgattttttctgacattttttctcctcatctgcaaaataagttagtatacttcattatataacgactccttacaacatagcaaaaaatacgcttaggacatattctttgctttaaagacaaattattcttcttaagaacacacatatgttaaaatagtaaaagactaggaggacttttatgacttatgaattatgtctagaatacggtacttatccacttagacctgtagatgcttgggctgatgaaatcaatactgcacctgcgtttattactgaagataaaaaacttttagaacttttagaagaagtcaataccttattccatgagctctttttaacgatagaatgttccttccactatattggtcatgacttcccagaaaaaagagcaaaaatcacacaaatttatcatgtgattatcgaacatttaagcatacactaccctgaatatgacattaaaattgaatcattattaatggggtagttttattttaactaggtagaaactatctattaaaaacaatcgatatcactaattacttcaacaaatagattatctaaaacaaaaaaggtctctttcaagaggccttttttcataacttatctcactaaatattaaatgatacttttaccaaataatatcaccaatactctagactcttatctcttgaaagcaaggtacagacaatagccgcaaatccagaaataccaaatattataaatgctactccccaaccaaagtggtcaataataataccaatagctagagtagcgatcgttgctcctccgacataactaaatgtgccagtcaatcctgaagctgctccagctgctgcttttggaactaactccatagcatacaggccaaccatcataacaggaccgtagattgatgcccccaaacctagtaaaataatgaagtctaatgccatatattgaggtcctgctggaataaaccaataggcagctagtaataagattgctacaactaagaaggctacattggttaaaggtttagagtttttaaacactttggcagatagatatcctgctgttagcatcccaataataccacctatttcaaaaagtgaaaaaccacccataccagctgttgcagtaataccttttccaccatcttgcacactcgtcgctaaaaacttaggagtccatgagacaataccgtaacgtaaaatatatacaaatattgaatacaaggatgcccacatcagtttagtatttggtagaatatatttttttataatttcgcccatacccaaaacttcaggctcttctaaaatgtcacttgaatccacaacattagtatattgctctttatgatactcttctataggcggaagtccgatagattctggagtatcttcttgtaaaaagtaaacaagaacagccaaaagacaagccaccacccctggaaaccaataagcagcacgcgcttgattaagagaatcattaccagcaagagctagacctacaccagttaaaatcggcgctattgctccaccaaaattgtgagataaattccaaatggtagcatatttaattctttctttattatcataccaatagactaatgtacgcgctccaggagggtatcccatcccttgtaaccaaccattaataagatacatgatagtaaagagccagatactagtaattacagatggaataacaccgattaacacattaactagtcctgtaagaaacaaaccaactggaaggaaaattttagaattcgattcatctgaaatcaaaccagaaataaatttagagagaccataagcaatgtagctagcacaggtaataataccaatctcagtagcagacatattaaggataccagataaaattgaagtcgtattacgaacaaaatagtatcccatataacctacaaaaatagaaataaggacttgtacacgataacgaggatatttatgcttaatttcctcagctgataaacgttctcttttctgagggggtgcaaatagttttttcaacatagcaaattacctttccgatttttagatgtgtttaattatacaactatgaattcacactgtcaattaattaataatttattttttatcattttatcttatttttttaaatgtggataatactctttaaagtgtggataatactatattataaagctttttatctgatttttctgtattttgaaatcaaattatattttttaattttagtttatatttcaaaaattaaaacaccctataaccaagtatcacagggtgcatatttttatattatatagaatataaatacacatgcaattaaatatttagaataagttctgctcagttctatttttaaagtctacggacaaaaataaatacttatagttttattagacaagaaaaaagtaaggttgaaaaccttacttttagagactttttaatttgaatgccaaatatcttgattatattgttcgattgtacgatctgatgagaagaaccctgctttagcaatattgtgtataactttcttattccatgattcataatcttcataatcagcaagcacttgttctttaacagcaatgtattctttcaaatcaatcaatgtcatgaaccaatctttacctactaactcatcatgcaatctctttagtcgttctgcattaccgagtgacactatatcatcactaatgataaaatcaacagcttcacgaattactttgtctttatcatagtaatcttttgaacgataaccagatgtttcataaagattaatgatagtatcagagtctttaccaaatgtgtagatgttctctttgccagctaattcagctatttcaacatttgccccatccatagtaccaagagtaagagcaccattcaacataaatttcatgttacctgtaccagatgcttctttggaagccaatgaaatttgttccgaaatatctgttgcagggattaacttttccgctactgtcacattgtaattttctactaaatggacattaaggtatttattaacttctggatcattattaattaattctgataagcagagaattaagtgaatgatatcctgtgcaatagtataggctggagcagctttaccaccaaaaataactgttaatttacgtgatgggaaatgcccacgtttaatttctaagtatttatgaataacatataaagcattcatttgttggcgcttatattcgtggaatcgtttgatttgtgtatcaataattgagtattcatccaattcaatacctttattttccttaaggtaacgtttaagagccagtttgtttttaaatttaatagcagctaatttatcatgaacttcattgctatcagcataagttaacaatttttcgagctgagtcgcatcagtaagatagctatccccaattagttctttcaagtaatctgctaaatcttggttagcaaactccaaccagcgacggaatgtaataccgtttgtcttattgttaaacttatctgggtaaatatcatagaaaacctttaattcactatttttaaggatttctgtatgtaatgctgctacaccattaacgcttgttgagaagtggatatccatatgcgccatgtgaacacgtccagcttcatcaataatttgaacctctggatttgtttgctcttcacgaatcatttgatctaattttttaatgattgttactaggtggggtactacctcattaagatactctaaaggccatttttcaagagcttctgcaaggatggtatggtttgtatagccaaccatattgcgaacaactgacacagcttcgtcaaattcaaaaccatgtttttctgtcaataaacgaatcaactcagggatgaccatagatgggtgagtgtcattaatttgaacataagcatattcagctaaatcatgaaggtttgaaccacgctcgattgcttcatcaattaataattgagcagcatttgaaaccatgaaatattgctgatagatacgtaataattctccatttttatctgaatcatctggatacaagaacaaggttaaattcttcttgatttctgtcttatcaaaagtgatacctttttcaataaggttataatcaagtccatcaatatcaaaaaggttcaaataatttttagtatctttcttataacctaatacatcaattctatctaggcgtgattttaaagtaaagtcacggaaaggaacatcataagaaatatctgttggtactaaccaagaattattctcaatccagtagttagcttctgcttcttgttgattgttgcgaaatacttgtttgaaaagcccacagtgatagtttaaaccaacaccttcaccattaatacctaaagaagaaatcgagtcaataaaacatgatgctaaacgccctaaaccaccattaccaagtgatggttctggctctacatcttctatttcagcaattgatttacctacaagttctaactcttttttgacatctttataaatccctaagttaatcaaattatttgaaagtaatttaccaattagaaactcagctgaaatatagtataccttacgttgagagctattttttgatttagcggcagcttcttcttttacaaaatttaacaattcaacgtaaatctcttcatttgttaattctgataatacttttccttgttgtccaacgtaagttgtaaaatttcttgtcatgataatattccttatttattccctctattataaatagttgtaatctcttttaagaatgctttgcgattttctgttaagtcttcttttctcatacgccattgccagttacctccaacggtatttggcatgttcatacggctatctgcaggtttatctagtagatcttgcatacatgtaatcgttgtttgactaacggttgcatacaaggtacgcagtacagtctcagtaatgggctcatttggcaaacgacgcatgtaattttctgcataagctttctgttcgactgtaagattttcaaaccagccattaataacttcgttatcatgagttccagcatatgcaattgtattttctgtgtagttatgaggaatatcaatactatttcctgttgtatcataaaaaccgaattccatgattttcatacctgggaaccctgttccagccagtaatctctctgctctctcatcaatatagcctaaattctcagcaataataggtaaatcacctaatttttctttgatagttgcaaataattctggaccgggagctggttgccatgagccatcattagctgtttgataatctcctcgaatttcccaataatctgaaaaacctttaaaatgatcaatacgcaaatagtcatacatcttaacaccagattgaatacgataaatccaccagtcaaaatctgactctttgtggtaatcccaattgtaaataggattgccccaaagctgaccatcgtcagaaaaatcatccgctggtacaccagcaatagcaagtggttgtttgtcgcgatctaatttaaacagttcaggcattgtccaaacttctacactatcggcagaaacgtagattggcatatcaccgataatttgaatccctttatcattagcatattcttttaactcaaaccattgtttgtaaaagaaatattgcgttacttcatgatattttatcacttcactaagcttttgacgatatcctgctaaggcttcttcttcgcggcgtataatagccttgtcatcccattcttgaagcgccttattaccaaaatgttctttgatcgccataaattcagcaaaatcagttacccatttttcttcttgcaagaaatcagatagcattctcgtagctctctcttcttgcaagaaatttttaactgctttttctaaaactggacggcgtttttcaaacagaccagcataatcaacaacttctggatcctgtccaaaactaatattttggtagtcatctttcgaaatgaaaccttcaagcgttagcaaatcaaaatcaattaaatgtgtattaccagctactgcagaaaaagactggtaaggagagtccccgaagcttgttgttgttaagggaagaatttgccaaaatttttgatcagtttcgaccaaaaaatcaacaaaagcgtaggcttctcgtccaaatgttccaatacctaaatcacctggtagagaagtgatgtgcattaagacaccacttgcacgttttttcatattgattctccttttcgattacttactttactcctccatcttaacgcaagcgattgcataagtcaagcataatttaaaaaaacttctatcgaaaattgatagaagtctttatatcatagcttaattattatttttagaaatatctcggacactttcacgctcttctaaagtaaaaggcacaataatagtctcactaaagactttgtctggagatttaatgatgtcaatcagacgacgaacgcttgtccttcctagattattaacattaatatcaaatgtgcttaggtaaggatgaatcagatgtgagaagagagaattattaaaggtcatgatagaaatgtcatctggaacttttaatttatagaaagaaagaaattgcattactctaacagagacagtatcaccaataacaattaaagcagttgtttcttcttctttgactctatttataaattcctctaaaacttgcggattgcctctgtcaaataaaagagctggcttttggtttaaacctaactttctagcacctttaaaataccctaaatagcgctcttctgatacttctgaatttaaatcatctgtaacaaactggatgcttttatgtccttttttatagagataatcaatggcagatttccccatcagctgattatcattatcaatataagtaatctcattttcatagccattagcagcaccaacaacaacaaagggcagtttatattttaataaatactctctgataggatctttttgatccgaatagagaacaataaaaccatccactcgtttttgtagatgcattaattttacttgttctaacaactcctcagaagacatacttgttgcaatagaaactgtaaactcatgctcttttgcttcattagttaatgtagaaagaatctccatgaaaaagggttcacttaagcggtctggtaaaaccagtggaggaaaaataactccaatattttgcgttaaaccactagccaacatttgtgctgcaacattaggaacatagcccagctcttccatagcttttttcacgcgctctttcgtcttacttgaaatagatgcattatcttttagtacacgacttactgtcgatggattaacaccagctttggcagcaacatcttttatagttaccatcctacgacctcttcattctaatcattttataccttttggtatagtcctttgtctattatactctaatctaagaaaaaaacaaacgtttgccttctctgcaaatgtaatactctcactaaaataatcttctcatttagtattaattgatattatttttttatttttcttattttttttaaaaaaagacttgactttttttgcaaacggttgcataatataggtgtaattaaaatattctctaggaggagaaccaaaatggaaaaaaatacttggaaaaaattacttgttagtactgctgctctttcagtagttgcaggaggagcaattgctgctactcactctaactcagttgatgctgcttcaaaaacaactatcaaactttgggtcccaacagattcaaaagcgtcttataaagcaattgttaaaaaattcgagaaggaaaacaaaggcgttactgtaaaaatgattgagtctaatgactccaaagctcaagaaaacgtaaaaaaagacccaagcaaggcagccgatgtattctcacttccacatgaccaacttggtcaattagtagaatctggtgttatccaagaaattccagagcaatactcaaaagaaattgctaaaaacgacactaaacaatcacttactggtgcacaatataaagggaaaacttatgcattcccatttggtattgaatctcaagttctttattataataaaacaaagttaactgctgacgacgttaaatcatacgaaacaattacaagcaaagggaaattcggtcaacagcttaaagcagctaactcatatgtaacaggtcctcttttcctttctgtaggcgacactttatttggtaaatctggtgaagatgctaaaggcactaactggggtaatgaagcaggtgtttctgtccttaaatggattgcagatcaaaagaaaaatgatggttttgtcaacttgacagctgaaaatacaatgtctaaatttggcgatggttctgttcatgcttttgaaagtggaccatgggattacgacgctgctaaaaaagctgtcggtgaagataaaatcggtgttgctgtttacccaacaatgaaaatcggtgacaaagaagttcaacaaaaagcattcttgggcgttaaactttatgccgttaaccaagcacctgctggttcaaacactaaacgaatctcagctagctacaaactcgctgcatatctaactaatgctgaaagtcaaaaaattcaattcgaaaaacgtcatatcgttcctgctaactcatcaattcaatcttctgatagcgtccaaaaagatgaacttgcaaaagcagttatcgaaatgggtagctcagataaatatacaacggttatgcctaagttgagtcaaatgtcaaccttctggacagaaagtgctgctattcttagcgatacttacagtggtaaaatcaaatctagcgattaccttaaacgtctaaaacaattcgataaagacatcgctaaaacaaaatagtacgtctagagtaatgagatgaggtgagtactcttcctttcaattgagagtgcttcccatctcttattttgtaaaataacaattaaaggagaccattatgaataaaaaactgatctcacttgatggtatgtccctaaaagaggtctttcaaaaaggtgatttagcaactaaactatcattcttaattatgggacttgctaacctcaaaaataaacaaattgtcaagggacttttatttttaatcagtgaaattctgtttttaattacctttgtttaccaagttatcccagctgtaaaaggtcttatttccttagggacccaagaacaaggtatgacaactaaaactgtggatggtattaaaatccaagttgcgacacaaggtgataactctatgttaatgctaatttttggattagcttcgcttatcttctgttgcgtatttgcctatatttactggtcaaacattaaaagcgcagcacatttattgaccttgaaagaagaaggaagagaaattccatccttcaaaaaagatattaaaagcttgacagatggacgcttccatatgactttaatgtctattcctttaataggggtgcttctatttacaatccttccgttagtttatatgatttgtttggcatttactaactatgatcataaccacttaccgccaaaaagtttatttgactgggttggttttgctaacttcggtaatatctttagcgggcgtatggccagtactttcttccctgttctatcttggacattaatttgggctgttttcgctactgtaacgaatttcttctttggtattattcttgccttactaattaatacaaaaggtttgaaattcaaaaagatgtggcgtactatttttgttattaccatggctgtccctcaatttatctctctcttaatcatgagaaacctcttaagtgacgctggaccggttaacgccttgttaataaaatggggacttatttcttcagcacatccccttccattcctttctgatccggtctgggcgaaattctcaatcatctttgttaatatgtgggttggtattcctgtaacaatgcttgttgctactggtatcatcatgaatttacctgcagaacaaattgaagctgctgaaattgatggggcgaataagttccaagtctttcaatcaattactttcccacaaattttgttgattatgactcctactttaattcaacaatttatcggaaatattaacaacttcaacgttatctacctactcactcaaggtggaccaacaaactcaacatactaccaagcaggtagcaccgatttacttgtcacttggctatacaatttgacagtaactgctgcagattataacttagcatctgttgttggtatcttaatctttattctttcagcagtatttagtttactagcttacacaagaacaaattcttacaaggaaggggcagctaaataatgaataagaaaaaacgtcttaaccttacttttgtttatattttattgatagtactatcaattatgtggctctttcccattgtttgggtcgttctcacaagcttccgtggtgaaggaagtgcctttgtcaactactttattcctaaaacttggacattagacaactacgctaaactcttcacccaaaacacattcccatttggtcaatggttcttaaatacattatttgtcgctacatgtacttgtatactatcaactttaatcactgtagcaatggcttattctctcagcagaatcaaattcaaacaccgtaatggtttcctaaagctagctttagtcttgaatatgtttcctgggttcatgtcaatgattgcagtttactacatcctaaaagctctaaatctagaccaaacattaaccgctttaatatttgtctattctgcaggagcagcattaaccttctacatcgcaaaaggtttctttgatactattccatactctttggatgagtctgctatgattgatggggcgacccgtttggatattttccttaaaatcaccctaccattgtcaaaacccattatcgtttatactgcattaatcgcttttatgggcccttggatggactttatctttgcaaaagttattttaggtgatgctacgagcaagtacacagtcgctattggtctcttttcaatgttgcaacaagataccatcaaccagtggttcatgtcatttacagcaggatctgttattattgcaattccaatcacaatacttttcatgttcatgcaaaaatactatgttgaaggtattacaggtggatctgtaaaataatcttcagataatttaaagacacgacatttttatttcactgtggtttcttttctaaaaaaggcttgggttctattgaattcaagcctttttctaagctagatagttaaaaaacttggtttaccaagggtgttaacctctacaaaaaaataacttgatagtgctaagtaatttgacagttgcttctatttactatattattaatagtgttatctacaaaaggagcgtttttcatggaaaaaacaaaatcattctttggacatcctcgtggtttgtccactcttttctttactgaaatgtgggaaagattctcatactatggtatgcgtgctattttgctgtactatatgtactatagtgtttctcaaggtggccttggtatggacaagactgtcgctgcatcaatcatggctgtctatggttcactggtttatctctcatcagtaattggtggttttgtcagcgaccgtattctaggtagtcgtaaaactgttctgtatggtggtattctaatcatgctaggtcatattgctctagctacaccatttggtcaaacagctctattcatttcgattgctctaattatccttggtactggactattaaaaccaaatgtatcagagatggttggtaatttatatggagaaaatgattctcgtcgtgatgctggttttagtatctttgtttttggtattaaccttggtgcttttatttcacccattgtagtggggtacctcggacaagaagtaaatttccatcttggtttctcacttgctgctattggtatgttctttggtctcctccaatataccttagatggaaaaaaatatttgactgaagagagtctcagaccaaacgatcctttaagtcctgaagaaaagtcctctctatataaaaaagttgggcttatccttattggtattgttattgtacttattctacttcacttgatgcatatgctaacaattgaagtaattatcgatatttttagtattattgcaatcgccatcccaattatttattttatcaagattttaagtagtaaaaagatttcttctgttgagcgttctcgagtgtgggcatatatccctctctttatcgcctcaattctattttggtcaattgaagaacaaggttcagttgtcttagccttatttgcagatgaacaaacaaaactttaccttaacttctttgggcatcatattaatttcccatcaagttatttccaaagtatgaaccctctcttcattatgctttatgtaccattctttgcttggttatgggctaaatggggaagtaagcaaccttcatcacctaaaaaatttgcgtatggacttttctttgctggagcttcattcttatggatgatgctaccaggtttactctttggagttaacgctaaagtaagccctctttggttaacaatgagttgggctattgtcatcgttggggaaatgctaatctcaccagttggattatcagcaactagtaagctcgcacctaaagcattccaagctcaaatgatgagcatctggttcttaagtaatgctgcagcacaagctattaacgctcaaatcgttaaattgtacacacctgatactcaaactctttattatggtgttgttggtggtataacagttgtatttggatttatcctcttattttatgttccacgcattgaaaaactaatgtctggagttaaataaagacatctaaaaagaactaggttacattcctagttcttttttgtttaataaaattttcttataaaaccatcttcaagtcgcttactataaaacatctctgagatgtcatcttcgtcaaatactctcaaaaagttaagcatatcatatgctagttcaatcttatcaagttgtgaacgttcaatccatacaacatcaccttcatctgacgattgtaattcacctgaaaaatcatatgttttataaaggaataccaaatagcggatgccttcatctgtgtaccaatgcttcataccaactaatttgggattacttattgttaaacctgtctcctcgtgaacttctcgaacgagagcattctccttcttcaatatggccgcctggtaaagcagctcctgaccaagaataacgtttaggatcacggatttgcatcacaatacgtcctttattatcttcaataagacacatattagttaaaataactttttgactgcgtgacattttttcctctagtatataaatttagtgatagagttacaataccatttatttatcaatttttctacaaaataaaggatagtaacttaactactgtaggttaagaaaaatcgaataattccgataatagacatgattaaccctattaaaatagaaataatcagaataagctgcatgtcaaatcgttttttctctcttttttctttaggaatttgatatcgctcttcagatagacgtttattaatactctcctgaagtaaattcttttttttcaaaattttccccttaattaattacagattgatactgagtagagcttgaaacatgacaatcttcaagctgctgttttaatgctttttctatattacatttattgccaattagtggctgcaagtgcgaaataaatgtaaaaatatctttttttggaaaaatatttttaggtgatacaaaacgaatttgatgactagtctcttcgaaagcaaaaattaactgttgatgttcaaaagcagagcgaactgctgataatatctcattatgatgattaatatcaagataaaaagcacaaatatttgataaatattgtatttgatttgttgtgatatttgggtagagtacaacattatcatatttgccaaaattcatgagatcactagacatctcggtcaaagcacctatgttaaaagtcaaattaggaagagaagtcactaaactttctaatgcttcgatttgatcagaattcgtcaaaataagagcttggttatgtaatttttctgtctctttaagaggatacataaatcctaaaaagctaacttgtttttgttcttcgtcagttaataacctcatagcattagcataagcttcataactttgaattacaattttagtgtttggggaaggattgttcaataataagcgcatatttcctggaatatcatctacgagaggctcctgccaaaagagaacatctttactctctagacgattaaggtaaaagcttactaaaaatggtgttgacagagaattatagaagattctatctaagttaaattttgcttcttgaagataatttatgacaaattcaactttagatttaaaaaccttaaactgattattatcatttaaaatataatcccctgtcatatggttctctgatataacctcttgcctatccttattataatatgacgtctgaatcgcttgaccatccgcgttataaaaggtttgtgcaaaacagaacccaaacttattaaagcgatcttttaaaatgactctaccttgctcatcaaaccagtctacctcttttattagacgcttatgatttgggtttgcataaataattctgccctttttgacacctaagtcaacaatatcagcaccactactaaaaccaataatttcccatgtatcaggaactctaagttcattgtagtaaagtgggcggccagcacctgtctttgcaaaaccagtgtaatataaatagggtgatgttacgtcgtctggtaaaaaaccatcatcattcaaagctatagtagggttaatataacctgattttatcaaggaaaaatgtaaatcccaacttgattgagtgtaactatcaaataagttaatcatcttgtaccaactccttaactaagttataccattttccttctacttcatttgttaagaatccttcggcaatggcgtaagaagcttctcgtaaagccttttgatcctgttggaataattgtaacactttctctttaaaagcttctacaatagcttcctcatcatccatatcaaatcgaggaattagataaccattttctccgtctttgataaaagtttgattaccataacgaacatcaaacccaatcaaaggaagtcctgcgccaatagcttcaagtaaagttaagccaaacccctcacttttagaagctgtcaaatataactcataattttgataaacattcgagagatttttatgtcccatcaatcgaatgtattccgttgcattggctgcatttataatatttctaattttttcttcttctccacctgatccatagatatcaaaggtcacttcaggaagaatttctcttatcctaataactgcacgtactaaccaatctacatgtttttcactagctaggcgtgaagctgtcaaaatagagtacggacggcgattgtccattggcattttaagattgtcaattgagcctaccgggatagttataattctaggattatgatttgtaaattgtttaaattgttgttccaaaagttctgtttgtttatcagtggaggtaataaaaaaatcaaatctattagcgttagtaaactgataatcgtaatagttattccataaaatagtgtcagcagtcacagcattctcactaaaatgttccgcatgaacaacagtccctagcttagcgggtttaccatggcgcaaaagactctgagcggtatcagttcctctatccaaaagaataatatcttttgaagtgaaagtcattgattccaaaaaataatcaaaaaaagctactttggatggtaaaagtctgccattgataataaaacgacttgagctattttctaccatctccaaaaaggctgtactttcatcttcattgtagaatctacgttgataaaggtgagctacaccatctttaggatagtaatactctgagaaagtacgtgtataactataataatcttttctgataaggttgttatttgaaacgatttctacacgatgcactttatccttgttaaaattatcaaggtaaactgttaaatagatattttcatcttcgtagaaaaacttgattacccgacctttatcttcttttcgaacaagttttccaagatattgtttttgcaaatcttctatactaaaagttgtcggggcaagctcaatatctgaaaaaaaattatataaccaaataatttctttatcctgaaaacctatatttcgcgtgaggctaataatattatcagctgaaaaaaaatctgtaaaaataaacttagcatcaattccaagttttctcaaaacagaacctcggtatgcttgagcgtactcaacaccgctgcttgcccaaccaattccatggtttatattataaactgtcattatctttcatctcttatataaaataaatttgaagatctccattctcattgaaggatacttcactcaaaagtagatttctaaaagtttgttcacgaatttcttttttcatgatattgtaggatttatatgcttctttatgatattcgaaaaccgggttacgctgtgccgtttgacgagctgttgccacagtacgtaattgttgtagataatctacttcttcaatccaagcttcatcaatcgcttttaaagcagcagtacgttcaaagtcaccaaaactatcaccaagcaaattatgcttttctcgaagaatctcatcggctattttgaataaatagtttttaatttcttcaagtgacatctctttagaaatcccttgaagattgtaagacatattatcaaatataaaacgatttacttcaaaaatgagttcttctttttctacttcaccatctaaataagcaatgaaggaagaaatcactgtatcaataatctgtcttggactaaaatgtccactttctccattgatcaaagcatttctctcacgataaacatactctcgctgaagctgtacactcgaatcaaactctatcgtttgactacgtgcagactctcccttaccgtcactagcttcctgagtttgctggaataacttctgaaatcttctctgacctaaggctttaggtttttctggattaactttgtcacgatttttcctaaagtaatcttgcgcccatttaggacctgattctatcattagatcatcttcaaatgatacaaaaaattgactaaaaccaatatcgccttgtcgacccgaacgtccccttaattgtaaatccattctttgactcttcattctctccgttccaataactgcaagaccacctaattctgatactcccttacctaacttaatatctgtaccacgaccagccatattcgttgcaacagtgaccgcacctttttgccctgcttctgcaatcatctgtgcttccttaaccgcactttgagcatttaacaggctatgagggataccacttagtaataataattctgagaatagctctgacattctcacagaaccggcaactagtaggattggttgtcctgtatcatgaacctgtttaacaaattcaatcgttgcatggattttctctggtaaggttgtataaatcttatcaggatagtcaattcgtctaacaggagaattagttggaattctaactacttccatatcatagacctcaataaactctttttcagcagtttttccagttcctgtcattccagccaatttagtaaacattctaaaaagattttgataggtaatggaagccattgctcgagactctggtgtgacattaagatgctctttttgctcaatagcttgatgaacacctccttgaagtttagtaccttctaaaacacggccattagtcgcatctagcaacttgatttcaccatcgtcaaccacataatcttttcctcgttcaaataatttatgtgcttttaaagataagttcaaatgtcgcacaagttctcgattagactgtttataaaaatgagggattctaaaatatctctcagcttcacgaacaccctggttttttatccacacttcctgacgctctttgtcaaaataataatcaacttgttcttcaaaactaagaattagttcatctgctattttatagagattagattgtactcgaggtgaacctgaaataactaaaggagtctgggccatatctagaagaactgcatcagcttcatctacaatagcataatgtaacttgggcatatatttttgagatttagatgaagctaggttatcaattaaataatcaaagcctagtgcactacttgtactatagacaatatccgaactataaacagctcgcttagtcgcagcatctctatcctcttcctcattatcagaaactcccacaccgacactcaatcctaaaaaacgatatacttttcccatttcttccgcatctcgaatagcaaggtaggaattattagtcagcaacattgcccccttcccttctaaagcattgagatacaaaggcatagtggcagttaatgtttttccttcaccagttttcatctcagcagtatttccttggtgcagaacaagaccaccgattacctgtacatcatacggaaatagacctaatacgcgctcatcagcttccctaacaacagcaaaagcttcagcacaaatatcatctagtgtttccccattaactaaacgttttctaaattcagttgtcttagcttgcaactcctcatttgatagtgttgccatttggccctttaaactattgatagtatttaaagtacgctgaagtttttttaaacgtttcttatctaacgaaaataaactattaaaggctatcataattgtcgtcctgcttttttaaaagtgtgaggtaaggtagatgttcattaccagataagatcattgatactaaatttaaagaggaattttctgaaaccaatccatagtgctttacatttggagacgtctctctcgtatcccagacttctctaagaaatatttgttgtttggcagtcaagtgtggtaaggatttaagtaaaattccgaaaggagcaaaacaatcattaatataggcagttattctgggaaattttttagcataatataaagcagcaaaattaccttgtgttccatacgcaatgacattaatcttaatgttaggaaaaacttttaatgcatcttctaaccccttttccaactcaggtaatatcaaactatcagaatttaatgagggattgctgaccaactcgactttctgttgcaattgagaaatgctttctattttattaatatatacactatcttttttctcgaccaaaagaagatttaaaacgtcttgatgttcttcaatagtaaactctgtcgatagatttttctcctgaataacgctatctgtaacttcctcaagtttcaaataatgaaaagtaaaatcgctacaacctgcattaatcaaactaatggtataggtataagcctctttaggatagataaaaataatactatctttttttaacagttcaaaaccaacagactcattaaagcgattgtaaaattcaatgcgaacaaaaagagagctaactaaatcgagttctgcatttaatgacaagctataacgagttccctttcttagtaaaggtaagttaggagaaattctttttgactgataattagtctgggagctccatgtatacaagtttgtgctagaaggagctaatggattttcaaagcatactgattttcctaaaaattgtaattttgttccaaaattataagaaaaccttgaaaaatcatcccaataaatgtagcttatcgtactcattcttctttccttccaaaatcattagatagcattcgcctatactgacttgtaaaccatgcaccaacttctgcagaacaatcaccatgtcggccatcccaacctctgcctaatatcttatgcttctttcctctaaaatattgcaataaatcagaaaaggcagtcgcatcatagtcatcgtttttcatataggctaaggcaaaagtcgtatttgaaaaatctccttcttctatagatttccaaaaatagttatttaacttctcagaagaggaactggtcaagtcaccttgattgagtagttgaatatctaatgaagtagcaaatccatctggtctctctaatctttcacgttgagcaactgttcctaaattaaatattggtttaccaataataatagcatgaggatttagcttagcaccatggtaagtagcaccataagtccccattgaaagtccggataaaattaactgatcagaactaaaatttaaaaaggccagtttttcttgaatagcatcaactattttttgttcatattctttgcttcctatataaaaggcaccaccttgtaatcgtggatcacaaattaacatgaatggagtcttcatactcttcatcatccagaatccctcaaagccttcagctgaacgaaatcccgaaaaataaacagttagaggtggtttgaaatctactggatcaaaataagtcataaattcatgacctatagcatctatgtgacgttctcctcctagtagaaatgtgcccaatcctcctctaccattacgacggtgcaatggacctaacttaacgataccctttcccttagcaaaaagtttaactgcaaggctaccactaatatcggactctaaagaaataagttgatttaggtcttccttctcaaagtaccactctttagcaatatcatcaacagaaccatcaacaatcaacgagataaccaatcgaatatctatatcaccctctataatgtgttctaaaaataactcattataaaaatccgatgaaaatggaatattgtaagcaaaattaagcaaaaaactatagttctcaccaaattgcccttctaattcaagatagttatttccctgatagtttactacaccttcaaaatcatttctaatttgtatttgtgaaacttgaagtttctctccgtattgtcctataaaaagccctttataaaattgacgaattagctgatctggagagctactatcatatcgttgggccattttcgagcgtaaaaactcttctgttatccccgtagcatgtttatctttaggataaaatacttcataaacctcaaagaatgacgataaactagataactctggtccataagtttgctctgtcaacaaaagagcagatatttttcgaggtagtttttgcaataactttgacgatgtaagataattattttctgtagttacaaagtcagaaatttgatctggtttaataaagagccattccatattattagggatattctctttagttgcccagttctcttcaccaacttgaagaattgtaagttttatttttgacatatttatttaataactatttataattctttctaccaattgaccacctgtatagtcattgattttatcaatagaataaattaaagaacggttccaattagttaattgttcacaataataaggaattgccttttccaattcttggatctcttcaataatgtaaccgtttttcctgtgttcaacaaattctgttaatattgtatttatctgagggatacctgaacttatccctgcaatttgcgtgtataagtctggtattttcgagatatcaataatcaaacggacatactctaaccggtttatgatatctgtttctgacaaaggatgggtaaaagaaaggcgtgttttttccttttctacttcatcagattgcataagaacttgattggcatcatcgtctgataaactaaagaatttctgatcaaaaacttttgttgcttctttaaggtagtcatatgtcaattgccgactttcaaattctcgttcgtagctgacaaatgttacttttatatcattatttttgagcataaccttatataaggatgttaaagacttttgcaattctttatgggaaagtctatctacgacaaaatatatttctaaatctctaacttgattactttttcccaaagctaaacgcgtatcaaagggagaaacatgaacaactggtttatctattttttctttcaattgtgcagcaatatctagtctatcacaaataatagcgtctgctcgagataaggaagagtaatcctccaatacattgtgagcattattcctctccgagaaaacagataatattaaatttcctttactagtgttcccaacaataaatgcgttatgaacttgattaaagctaacaatgatagtatctgatttactaacttctttatggagataggtcagatatttctctctaatcaactcttcaatatcggagtaagataactttaaaaaatgaatagctttcttaggattaatttcaacatggtggtcaccttctcttaggtattctctcatgatcctttcccctgatggtgctaaataatcttgataggcttcaccaccattatcataatagagaatactagatagaaatcctctatcatcaaagaggtatttcttagctatttgttcatttgcaaaataatcaatatgcgttaaatttccttcttcaccaaattgaaccttagcaattaaatctcctgacttttttaccaaaactataaacggagtataggtaaagtccaccccttcaggccaattgagttgtcggaagtcaatcatttgctgtcttacattcccaatttcttgaatatcatcaaaaactgaataataacctgattctaacaagtcatagcgatgtaaataataacgtaaattgggcatatagtttaagacaactaatctactctcttttccagcataatcaaacatcttcatttggttgatagtatcatcaaaaccgacattagtcggcttgaaataccacaagtaattattatcataccaagtacgattttcattataccaagatggaataaaatgaaacattaattctcctcattttcaaatacagaagtgtattgtttacgaatacgaataacttggaattcatccaatatcataaatgacatccctgtgatcatcataaaaatccctgtcatagatgaaactgtcctaagatcatcatttccaagagcaaataataatggtacccctcctaagaaagccatgaaaaaaccactaaaagttccaaataaataacagattttcgataaataactttgtgtttctttaccaggtctataattaggaataaaatcaccactttctcgcattgcctcagaaattttagtcggatcgatattcacaaaagtaaatgcaactgataaaacaagcattaaaatcatataaataaccactccctgaatagaagataaactaaaatagtcattgtatgatgtgatatctggattagttgggaaaatacttcttagtaaaataataatatactgggggaacattagtaaggtataaacatacataaatgccatcccccccgaagcatttacttttattggcatgtaggcatcatcaacgagacgattatggattgaagtacgcattactggtatacgatattctgaacgttcaaaagttatcattaagtacattgctactagtgtccacaaaagaaataagatgatagcaagttgataaccatcttggaataattcaaaaataagaggaatattattaaattgcccaacaagcatacctaccaccactaaaatagtcattccaccaaacccgtattccgcatttagattaccaatccaggaaataatatatgcaccagtcacaagtatcattgtcgcgagtaataatttggtcagagaaaaaccattatgatattgaaaagatatggttatggctagcccttgaataattgctatgacaagcatcaccacattttggcgaaactgttgaactttttgagatactccactagagtatttaccaatcgtaaatagtcttagtaaaatcattgtggtcatcataggaccaatacccaatgaaaagaccccaacctgagacaaattaccaccagttactgttgaataaagcgtcgcaaagttattgtcttgtcccttataagcagaaatcaagacaccaggtattggaacatagcgaccaagtaaaaaaatgattattaatgaaaatgttatcaatattttacgaagaataatatttttttcaaaaatatatagtaatttcaatggaatttctctttctctatcaatttgttctcttcaagataagtaactttatatcgtcaacttcgttaattttaaaatcaagaaaattgatttcaatattcaagtaaccattactcttcttgactatctattttgtttaatagtgtcacacaaatattcaaaatcatccatggttcgctcaaaagaaatatattgattatcttttcttgcccgtctgattccatatatagttttaccctcagttatacatctatcaacaacattccaaacttcttcaccatgattaatatctaaatatatatcgctatttaataggagtacttcgaattgctcttcagtaatagcttcatgtaggtaataatttggataacctactaactgcttaagtctatccgaacaataaactggggcagcaatatgaaaatcagtattaggacatctttgtaataaatgttctagctcccatatatcatctgttaacgtcactgtcaaagcgtactgtctatctgatgtaccaatttttgatacaatttgattttcgtaactattgtcttctattaaagtaatatcttcgtcaaaattatgttctgccgtatgtttatgagaaagtttcaccttagaaactgctcccatcttaaaccactcatattctgaatcgatatgacctaaatcaatagcttgatgtcctagctgcgataaatcttcagctaatagctttgcagttggaccaagcataagtaaaattagcttacctctactatgttcaagtatagtttccttgatttcataaaaagatgaaaatgcatctttcgaaggacaaatgatacgcgaaatagtattggcatcattaaataagtcattgccaacgcctgaacgagaagtctcaccctcgacaattaaaatatctttatttttccataatgcttttagctgttcaaagtacgttactgacaaactcttatccagtaaatccatatagggtctagaaataaaagttgaaccataccattcagcctgacaatttttttggtacaaatcattatactgatatagatgatccctccaaaattgttgtgaaaaatcgttgtatctacctaaattatcaaaaacatcacttacacagataactaacttctcattactctgtcgatttaataaacgttctaatcgcttagcaagttcagaatcataaacctggtaaggaatagaattccccgcaataatatcaatttctccatcaccaaaacgcgctaccgaagcggtatgtttagaaatataatctaaagtttccgaaattgtttttactttaataactctcataactattaattcttttcaactctctttgcaagattacgacaaataaaatggtatttactgttaccttgataaccgatttgatatcactttatatattattgttttctgtaaattttcttgttctaagcgctgtttatagtcacgcattaaccaaaaatatctctctacagttgcagttgaatccaatcctgatagtataatctccgacaatttactatcaaaaatataaataagatcctctgctcttttggatgaaaacgccgatgtcataatgctatttggacgaattctatagccataatagcttccattaactaaaattgtttttttactttttataaaaagtaaaacacttaccaactcatcttcaaatactttatctattgggaaggtgatggtatcaaatagttctcttcgatataatttcccccaaataacgatgaatactgaactatttaaatgccaatgcacttgtctatcaatagctgtttgagcagagatttcttcgataacaaaatctttgtcagtgatgtagtaaccaaaaatatcttctgtttctctgtagatatagtaattactgataacaatatcagcattatatttttcttgctgagctagcagtacttccaaataattttcctttacccaatcgtccgaatcaacaaacgtaacaaattggctctctggactaattcgtgctaatccaaagtttctagctttagaagcaccgccattttcgatatggaaaactctaatacggttatctcttagggataattgatcgcagatactagcagatgtatctgtagaaccgtcatctatcagtagaatttcaaaaacttggtatgtttgtcctaaaatggtatttacacacccctctaaatatggtgctgcattatagactggaataataacagaaactaatttatcagtcactattgcctccatttttacataaaaactgtcgcatatcctccaaattaataaagcaatgacttaactccctatattcaaatgtcactgcttcattaaaactcaatatcggaattgatttctcaatagctttttgacaaaattgtatttccttccaagaagttgagatatcaaggtaataatttgctttagtcattagttgttcaaaaagtgggctggttattgaaggatacagacgaacgttagagtttgtggctaacttaagtaatcttgggccaaaagaggtccaagcagctatatggaagcaactattggggaatagttcaaccaattcttcaatataaagcaaatccacggacgttgtgaaagtaaagaagtgtttttcaaatgttggctcaggtaacagatacgtttcaaaattaaacacctcattccaatctagttgctcatattgccaccatgtctccctaaaccttgaagaagaaaaagtattccatggtttatcatgagtacagtaatggataatagtaggcgattcaaagttacgatcaaaatacccttgccaattttcataaaaggcacctaaatcatttccaacttgagcattatacttatcttctaacttaagccaattattatcaaaaagaagattgagaaccccttggtctccaaaaattccattatccaattctcgttctgttatttccagaagtttttctgttactcgatatctcatccagtaaagcgagtttattagcataacacctgagttaaaataaataccgtctccatctaagatagctgctatcgggtagtcccctaattctatctcaaacaacttatctaagttatcaacaaccaaagtatcaatatctaaataaagaactttctctgcatcaatcagttgcggaatgtagtaccttgcataagccatataggtaatatgggcacgggcgttttaaattccttaaaagtatcatcaaagagttttatatcaaaaatacaactatgactatttaataaacgtctttgaatatttctaaaccattctgaagctatatcttgatttaaaatataaatagacttcctgcgaaactaaaatcctagttcacggttgatcattccagcaatcaaattcattcgtaatccaaaccgtttgcgtcgatttcgataggttgttgaaaatattttaaacgtttttactttggcaaaaatattctcaaccttgattctctctttggatagcgtatggttataggttttatcttcaagagttagtggcttaagtttgcttgatttcctcggagtttgcgcttgtgaatacatcttcatgatcccttgataaccactgtctgccaagattttagcagcttgtccgatgtttctgcgactcattttgaacaacttcatatcgtggcaatagttcactgcaatatccaaagaaacaattctcccttggcttgtgacaatcgcctgagccttcatagcatgacatttctttttaccagaataattcgctagttgatttttttaggacgattgatttttacctctgttgcatccacaatcaccgtatcctcagcactaagatgagtttttgaaatcgtaaaaccactttgaataagagttgattcaacccattgacttcgacggattaagttgctttcgtgaatgccaaaatcagccgcaatttgttcataagtgcggtattctcgcatgtattgaagagtagccatgaggagatcttctaagcttaacttaggggttcggccaccttttgcgtgtttacgttgataagctgtttttaacacagctaacatctcttcaaaagtagtgcgctgaacaccaacaaggcgcttaaatcgtacatcagttaattgtttgcttgcttcataattcatagaactattgtaccatattttgtttcgcaggaagtctaatacttactctatcattgtgacataaaatcgattttataactgtttggatctgatttaaagatttattatcacctgccaaacaaataacgttatttttcacaatattcctttctaatatgttctttaaatcgttcattctttaaataatcaataatatccgtaactctctcaaattgtttgccttgaccatgataagttgtagaaagggataaaatatctttacctaatttcttcacttgctccagaacctgagtatctgcatcaccatgattaatatcaaggtaaatatctgaattttcaactagctcatttaatttgaaacgataaacaagtggataaagttttatatttgaatgcatttccaattgtttcaatttttctgaaatttgagtataggcagcaatatgaaattgccagtttggtaaatccttagccaacctctcaattccttcaattgaatctgagtaagtaaaaatgaaagctcgatggataggttgtaacactttcttcaatgaaacatctacaccatcattgacttgccatcttgtaaaaatatcgcgccattcaagtctattatattcccaccatatatcgcgccaacgaacagatgtttcaaggtatttccatggttttgtcgctgtataatgaataactttaggtaaatctttcctgcgatttaattgacgttcagactgttggaataggttatataacatatctgctcctgtatgatagttataagtttcatcaagttctagccaattatcgcacagtacatcattcaaaacatcctggtcatgatattgaagagccccttggttttctctagtataatctaacagtcgctgactaatcccttgttctcgccaaaaaatattattaattaatagcaaacctgaattaaaataatcttctttaccatcatattcttcgagcaaatcatctcgaacagccgctacaccatattttgaaatatcaagagtaaatatcgatgttaaatcactggtgataatcatatcacagtctaaatatagtaccttatcttcatgaataacttcaggtataaagtatcgaaagtaagtaggatagggcatcggtttttgaaatttaaaatgtttaatttcttcattaaaaattttagtgttagatattgtgcaatccattttagataaatgatattccatcatttgaaaccattcaactggaaaatcgtcatttaagatataaaaatcaataaattgattatgaaagcatattgatttaattatagtcttaacttgctcttgatagccaaaatctgccgctaacgcgatagcttttctatttttcatctaagaggacctacttcccttattcttttaaccatcaattcaggcattgtttctgagataacttctatattttttgtcgtatgtgctgtagaatcaaaggctaaaatcggtttattctcttcttttattttatctagaataccttctacttcgtaagaatgattaatatccaagtacacatcacagttacgtataagctcttccaagatagggttgataactaatttataaactttaatattgctataagtttctagattagctaatttctctgaaatatcactacgtgctgcaatatgaaactgataatctggtagagcttttgcaagtacttcaatatgttctaatgtatctgaggctgttaatgtaaataaattcagtgttttacctgttaacctgttcaaatttttttgttgttgagcataaataactgaccattctaaaccaaaataataccaccattctgaacggtatcgcgattgactatatttattccacggtttatcttgactattataatgaacaataacaggttcgcaatcatcataaaaatgatacaaatctggtcgcccatatgcattaatattgacatcttgaccaatctgaacattatattgtttaccgatatctatccaacgattctgagtcaaaatattaaggtattcttgatctcctaccccaacagcagaacccttatcagcaatcctcataaggctattataaatttcttcttttttccataatgaattattgattagcataacacctgaattaaaactaactggtgctgtatctccatagtaaagcgttgaaaaatgatctgctacagctcctaataaattctcttcaaggtttatgtcaaatagaggatccaaagaacccctaactattacatcactatctaaatataaaactatctcttcttcaaggtgaattggaataaaccatctgaaaaatcccgccacactgatatggctcagggtaggtatcccctcaaagacatctgaacttatgggaatattttttactctacagtcaaactgttctaaagaatggttaaggatattaaaccattctacgggaaaatctgtgttaatgatataaatagttaaatgttgattatgactaacaatagattttatagttgtcataacttgatcacgatattggaaatctgcacctaaaacaattgttttcttcatcgctacccctatctataaagcatatgcacagcatctatcaacaattttttagtgatataaccatttcgcaagagagttgctatcttctcaacattttccacatagctgtcataagtctctttttccatattattaattttttcaacagcttcttctagcgtttcaactgtaaatcctaatccgtgttgtttgataaagtctctacttgaaatatcatggttagcaataattggaagtccagcagccaagaaagtagataatttatacgaggcattcatcctcgaataacgacgctcgactaactcctctctatcttcactccaacacaggccaaatcctccccgcttagaaagacttagcatcaattctacatcatctttccatccctgagcatgaacatttgcctcagaattgagtctgcttccgtctccataatagatgagcgggatattttccttccagtcattgacaaagggaaagcgttgaatatcgcctgcaaaactaaggactttttgacattctggacgagggaggtctatattaactggatgatcccatacttcttgataaagaactttagaggtagtcatccctttttcaattagataatcatgcatcgcttttgtaggtagaataacaacatccgaacgattatacatgtcaattactctatctaataaataaaaattagactcaaacattaagggaacaatatcatgtacaaaagttataattctagcaccgtatgcctgtaatttatctagaaaaagttcatcaaattctgttgaattccatgtaggtacttgaaaaacaacaatatcccctctgcctaatcccgcaatgataccatccatcctagtacttctttcaccatgcgtttcagcatgatcattataaaagtagattcccatttcatcataaccaagttgacgtccgacatccttaactagtttttgtgatataagggcaatgctacgcggtgactgcccatatatacttgtaatatgtactcgcattttagttaatctctctttaaaactctctcttatccagaccatatcataccagttaaataatagttttattaacactcattgtactaaaatgatccaaagcttttttacattatttttgagtttatcgtaattgataaacttattttcagaaataaattccacttcttaattttatcatattttagcagaaaaacattgcttgtcacttgataaatatagatttacaaggctttttacaaacttctacaacaaaaaggcatatctctctaaaaatattaagagatatgccttttaccatgtcatttagtactttaagaattcaaagtaggtttagtctttatcttttttagatttttttcgtcccaaaagggttgcaccagtcattaaacctaaacctaaggcagtagcagttacagaataatcttggtcacccgtagaaggtaaggcagaatacaccttctcttttgatgaattagaagtcactgagcttgaagaacttgtggaagcgctggtacttgctgatgtcgatgcactcgttgagacgctggtgctggctgacgtcgtggcactcattgaagcgctagtgctggctgacatcgaggcacttgttgaagcacttgtgctggctgacatcgaggcacttgttgaagcacttgtgctggctgacattgacgcactcgttgaagcgctagtgctggctgacatcgaggcactggttgaagcactggtgctggctgacattgacgcactcgttgaagcgctggtgctggctgacgtcgaggcactcattgaggcgctagtacttgcacttgtggaagcactggtgctggctgacgtcgaggcactcattgaggcgctagtacttgcacttgtggaagcactggtgctggctgacgtcgaggcactcattgaggcgctagtacttgcacttgtggaagcactggtgctggctgacgtcgaggcactcattgaggcgctagtacttgcacttgtggaagcactggtgctggctgacgtcgaggcactcattgaggcgctagtacttgctgacgtggatgcactggtactggcacttgtggaagcgctagtacttgcacttgttgaggcgctcatacttgctgaggtggaagcactggtactggcactggttgaggcgctggtacttgcacttgttgaagcactcatacttgcacttgttgaagcactggtgctggctgacgtcgacgcactcatggaagcgctggtacttgctgatgtcgaggcactcatggaagcgctggtacttgctgacgtcgacgcactcgtagaagcactttctgataaaagtttaatttcggcattcgcatctgagtcaccacttatattcgtatgcccataagaatatttagaaccatatgtttgatttatatcagaaacagttgaatacaatacaccactttgtttaggtattttgaccaaaacaacataagatgtagtggaagaaatagaatttgttttccaatctatggtaattttagaaccatcgttagtataactatactgggaagtcacatcttcaaactcaggcgaatcataattttgatccatactatctgtaagattttttgaattagtttttagaatctttacttccgcatttaataaattaactggtgaacctgatgttccatctgaaccgataatagtatatagattcccaagtcctgatgcgaaatacatttccttaccttcaggattaatttgagtaatataagtttctgtctgtctttcatcatcaagcttcatgatccgagatcttacatttgtcttaacattagtatgttctgtcactgaaggactattatactgaacacgttcctcaattgaagcaacttgattgttcaatgttgcagtaaagcactgcttatctgaagttgttttagaaattattctctggtcaggccaaactggcatattgactctagctttaatattattcaacgtagaagcataccttgtccaggtgtatgtaatattatgtgttaaaggactatatgacccagtcgctaataactgccccgtttcatccattatatcttgaacttttagaatagtaccaatcccttgtgtgtcaaggttatcagaaagctttacagtaaagacatctccctcgttaacagaagcgattgaaaaggcaaagttcaaaacaaggttttctgaactatctaatttaactgttccaggctcactaagagtgttatcttttaacgcaatattaactttctgcaactcgcttgatacatctttacctaacatttcagtatcagacacttcttctagtggtatcaagtccatctccgaactcaaagtcatcaagttcatactccttggctgaataactgattttaatctaattgtcggagttagactctcattcccagttttatcgcttgcaatcattacttgggatttctctggagttataagcgactcatttgacattttggaagtctgtaactccgattttggttttgtaatttcaattaggctagatactgaagcatttttaccagcatcagtaactaagctactttctgttactatctggtttgccgaaaacgactctcttcctttatcagttaaagaagcttgagtttcaagaatatttgaaacctcactaatacttgtagattttgaaacactttctgaggctgacgtgcttatcgattctgaagcacttgttaaagcagatgtacttacagattcacttacacttgttaaagttgaccctgacatagacatacttacagattcactagtacttgttgaggctgactctgacatagatacactattagaatcaataatgtttttcgatactgtcccatcttgatgattttgaacagtagttgttttaacagtcacttccgtttgttctgccagtgttggtacagaacttgattgttcttgaacaactggagtctcatctgcataaacacgactggttaaactcgctccacctaccagagctccagcagctagtattcctttgagataggtcaaatttcctgaagatagtcggtcttctttttcaacatcttgaatacacacatctgcttcaacagttgctctccctttaatcgctttaaatagattaaaatgcgacattactgttcttacccagtttttttctgatttatgcatcttgactctactcttagtatctacaactgttaactgcttgccaaaagtcttttgggacatgtttcctccatatataaatattttttatattttgttttggtttaaaaacataacagtaaaattaagtgattagaaatctatcttagttaaacacaaaaataatgataccgttaagcacgtagatacatcatttttatacagatataaaccttacaattgatttttagtatgatttcataagaatctcaactgatgcttaataaacctttatgaggttatcactaattatgactaaaataaatatactttaacccctcattttcccaaaaaggcatttaaaatatttattttttgagaattattattttataaggttaaaatatttgaaacattttatattattccttattatagtattaatgagtgaaaggagttgtgtaatatgatagaaaattttttagaaaaaaatattcttaataaagttaaattacttactttatgttatgataccccctcactatccttagataccgcctgtaaccgactccacttatcaccagttgagcttaaaaactattgtcataaattaaatgttttatttggtcataaactttctatccatatccaaaaaaaacggattttatgtaagctaaataaacttactcaggaagatgccttaaaaatagtttataatgagtcaaacactttacaacttcttaaatttttaattgatgactcgtctgataaaaaatctctagtagcttttggaaatgatctcttcttatctcgttcttctgtctatcgtctgcgagaaaatttaattcctttaattaaagatttaggattatctttatctaaaaataccattgtaggtgacgaatatcgcattagatatctcatcgcatacctcactactaaatttggtattaaaatttacgatctgtctgctctagatattaagattattcgacaatttttatttgagagtggtactaatataagacctactacgcacctttctgatatctttgttttttttgatacgcttttcattttaacctgaaaacgtcaccatcataaagttaaaattccaaactccaaacttttctcttctcttaaaaaaatctttatttatgaggagctgaatacatgtgtaaaaagtatcgttcaaccttacttcaatgttatttttaattcagaagacatggattatatttttcttatctatcttacaagcgctaactcttttgctgctcaaaagtggactgaaacacatgtcgatgaagtgttagctatttttaaaagtcttcctaaattccaaatgctactacaacctttgaaagaagctcttccatactctgacacctactacgatgagctagtgaaagtcactatttacttttctcgaaacttcatagttggtctgaatcaattaattcctgaaacacttagttttccttcaacattctatcctggaaataatcctaaactaatatccattatcgaaccaatagtcactcattggctaactgaaattggagaatcaaagttcaaaaaaacgcacttcttcttgctctgtgctcaccttgaaagagtaataaagaatagcatgcctcctataaatattgtgttgctgacaactgattttattaataatgaaattttaaaagactatattttgcaatccctttcaacagataaaattagatttcattcctattacttattgacagataatattagtcaaatatcgaccttaaaacccgatttaattatcactaatcgaaaactgtttacctatgttacaaaggaactagctacaaatagtttagtcgctcatattgattacaacgatacaccctctcaaatcagtaatatccaaactattatttctaatattaaagaagaaaaatatcgaaaaatctttgataaaatataacatcacctactgtattcttttgatttcaattattaataaaacgactagagcacttcattaactactctagtcgttttattaattctgttcatcgtattaatcgattgcttttagttctaagataacatctcggatttgtgcagctagctcaaagtccaataattcagctgcttcttgcatttgctgttgaagagctttaatttcagcttgcctttcttttttagataaactactgtaatcgacaactttttcaggcttatcgctgtcattacttttagtaatagcaattaaatcacggatttcttttttaattgtttgtggcacaattccatgcttttcattataatccatttgtaaacgacgacggcgagcggtttcatccatagctctttgcatagaatctgttattttatcagcatacataataacatgaccattactgttacgtgctgcacgtccgattgtttggataagaccacgctcattacgaaggaaaccttccttatcagcatctaagattgcaacaagggaaacctcaggaacatctattccttcacgtaagagattaataccaattaaaacatcaaacacaccaagtcgtaaatcacgaataatctctgtacgttctaaggttttaatatcgctgtgcatatacttaactttaactcccatttctttgagataatctgttaagtcttctgccatacgctttgtcaatgttgtaataaaggtacgctcacctttttcagtcctcaaattgatttcaccaagcaagtcatccatctgccccatacttggtctaacttcaacttctggatcaagaagtcctgttggccggataatttgctcaacaactgtatctgtttgctccatttcatagtctcctggcgttgcagatacatagacaatttgatggacatggctttcgaattcttcacgacgaagtggacggttatctaaggcagatggtaaacggaaaccgtaattaaccaacatttctttacgcgaacggtctccattatacatccctttgatttgccccattgtcatgtgactctcatcaatcataatcaaaaaatcttctgggaagaaatctaacaaagtaaaaggtggctcaccttcacttctaccatccatgtgacgtgagtagttctcaacaccatttgtatatcccatttcacgaagcatttcaatatcatattctgtcctttgtcgaatacgttgcgcttcaatcaatttcccttctttttcaaaaagttctacttgattttccatttcagcttgtatttttgaaatagcttcttccatatgttcatcatttgtcataaagtgtgttgctgggaaaatagctaaatgttccacttctcctagcacacgccctgttaacgattctatttctcttatacgatcaatttcatcaccaaaaaattcaattcgaaaggcatgctcatcacgactcgcaggaaaaacttctacaacatcgccacgaacgcgaaattttccacgttgaaaatcaatatcgttacgctcaaattgaatatcaacgagattgttcaataactgatcacgtgaaatttcttgacctggcctaaggctaacaacactgtctgcatactctttaggagaacctaaaccgtaaatacaagaaacagatgctacaacaataacgtcatttctttctaataacgaagaagtcgctgagtgacgtaatttgtcaatttcgtcattgactgaactatctttttcaatataagtatccgaagaaggcacataagcttctggttgataataatcataatatgaaacaaagtactctacggcattgtcaggaaaaaattctttaaactctccataaagttgacctgctaaggttttattatgtgcaatcaccaaggttggcttgttaacttgggcgataacttggctcattgtgtaggttttaccagtaccagtagcaccttttaaaatctgagctttttctcctccttcaatattgtcaaccaacgtttcaatagcttgaggttgatctcccgaagggctatatttggaaactaatttaaatcggttagtatcttttctatctatcatttctttacctcgattactttattttaacatagaaaaaagaaaaagactgagctgcaacactcaatctgtttcttcagtcttaattagccatagaaggtatataattgctgctaagagaacaaaaatagaaatcaaacttccttctattccgaatgcaccacctgatatccagtccggtgcgttttctttaacggtaaaatgcaaaagagatgctcctgctttctgaccacttacggcaataccatagagattaccttggctaaaattccaagctccatgtaaggctgcaacactccaaatattaccacttttaatcatatacaaggacattaaaactcccgaacatataatacttacaatagaaagaaaagtgacatgggcatttaccaagtgcaaaatgccaaataaagtggatgagacccctatggcaacagctaaatgaaaacgatgattaattagaggaagaagccaccctcgtgttagcaattcttccgtaccgctttgaataagccaaaaaggaaggagagttacaacatagaaaatcgttgccttagaaacatcatagctatgaaagtcaagtcctcccaatatataagcagtgatgacagaaattgaaaatagaataaaacctatactccagccttttataagtgaccacagagttcttttaaactttgtagaaaaccccaattctgaaaaaggtcttttttctacgaattttacccagataagcaaaaggaatgctgaaaaactaaaggttcctaattctccatagatattattaaataaattaataaactcaaaaaaagtataggaagaaaacttatagagtacagaagacactagaacaattcccacaccacctagagttagaccaacgaaaaaaaataggtataccataaaacaagcaaataacaataatagccatgacggccagtttttatagacagcgaactgactatttaaaatccttttattcataataatcctaaatcctttttgtgtgataacactagaacgattatatcataatactaactaaagatatatataaaattaacataacatacatgttacgttttctaacatagaaatgacattttgttgctctatcttatttattttgatataataaaacacatatttataaaaaggagatttacatgaagcacaagttaaaagcttttacgcttgctttactctcaatattctttgtgtttggtggaaaggtcagtgcagagactgtgaatattgtttctgatacagcatacgctccattcgaatttaaagattctgatcaaacttataaaggaatcgatgttgacatcgttaacgaagtcgctaagcgtgctggctggaatgttaacatgacgtacccaggttttgatgccgcagttaacgctgttcaatctggacaggcagacgcgctaatggccggaactactgttactgaagcacgtaaaaaagtctttaatttctcagatacttattacgatacttccgttattctttatactaaaaataataataaagtcacaaactacaaacaactaaaaggaaaagtagtcggtgtaaaaaatggaacagctgctcaaagcttcttagaggaaaataaatctaaatacggctataaagttaaaacatttgatacaagtgacctaatgaataacagccttgattctggttctatttacgccgctatggacgatcaaccagttgtgcaatttgcgataaatcaaggaaaagcttacgccattaacatggaaggcgaggcagttggtagctttgcatttgctgtcaaaaaaggtagtggacacgataacctaattaaagaatttaacacagcttttgcacaaatgaaatcagatggcacttataatgacatcatggataaatggcttgggaaagacgctacaaaaacaagcggcaaagcaacaggtaatgccaatgaaaaagcaactcctgtaaagccaagttataaaattgtttctgattcttcattcgcaccattcgaatatcaaaacggtaaagggaaatatactggttttgatatggaattaatcaagaaaattgctaaacagcaaggttttaaacttgatatctcaaatccaggttttgatgccgctttaaatgctgtccaatctggacaagctgacggtgttattgcaggagctacaatcacagaagcacgccaaaaaatctttgatttttctgatccttattacacatctagcgttatcttagcggttaaaaaaggaagcaatgtcaaatcataccaagatttaaaaggaaaaacagttggtgctaaaaatggtactgcctcatatacttggttatcagaccacgcagataagtacaactatcatgttaaagcatttgatgaagcatctacaatgtatgatagtatgaactcaggttcaattgatgctctaatggatgacgaagcagttcttgcttacgctattaatcaaggtcgtaaatttgaaacacctatcaaaggtgaaaaatcaggcgatatcggatttgcagtgaaaaaaggggcaaatccagaattaattaaaatgtttaacaacggtcttgcttcactcaaaaaatcgggtgagtacgataaacttgttaaaaaatacctttccacagccagcacctcttcaaacgataaagctgctaaacctgtagatgaatcaactattttagggttaatttctaataactacaaacaattgctatctggtattggaactactttaagtttaactcttatctcatttgcgattgctatggttattggtattatctttggtatgatgagcgtatcaccaagtaatactctccgcacaatttcaatgatttttgttgatattgtccgtggtattccactcatgattgtggccgcttttattttctggggtattcctaatttaatcgaaagcatcacaggtcaccaaagtccaattaatgacttcgttgctgctactatcgctctttctttaaatggtggtgcgtacattgctgaaattgtacgtggtggtattgaagctgttccttctggtcaaatggaagcaagtcgtagtttaggtatttcttacggcaaaactatgcaaaaggttatcttgcctcaagcagtacgccttatgttaccaaactttatcaaccaatttgtcatctcattaaaggatacaacaattgtatcagcaatcggacttgtggaactcttccaaactggtaaaatcataattgcacgtaactatcaatcattccgtatgtatgctatccttgcaattatgtatcttgtaatcattacccttctcacccgtctagcaaaacgtttagaaaagaggcttaaataatggcagaattaaaaattgatgtccaagatttacacaagtcgtatgggcaaaatgaagttttaaaaggtattgatgctaaattttatgaaggtgatgttgtttgtattattggaccttctggttcaggaaaatcaactttccttcgcacattgaacttacttgaatcaatcacaagtggaaaagttgttgtggacggctttgagttatcaaacccaaaaacagacatagacaaagcacgtgaaaatatcggaatggtatttcaacacttcaatcttttcccacatatgtcagttcttgaaaacatcacttttgctcctatagaacttggtaaagaatctaaagaagcagctgaaaagcatgggatggaattacttgaaaaagttggtttagccgataaagctaatgccaaaccagatagtttatctggaggacaaaaacaacgtgtagctatcgcaagaagcttagcgatgaatccagatatcttactttttgacgaaccaacttctgcacttgatccagaaatggttggagatgttctcaatgttatgaaagatttagctgaacaaggtatgactatgttaattgtgacacacgaaatgggatttgctcgtcaagttgccaatcgtgttatctttacagatggtggtcgtttcctcgaagatgggacacctgagcaaatctttgatacacctcaacacccacgtctccaagacttccttaataaagttttaaacgtttaataaaaaagatgacttcgtgtcatctttttttatatcctaatcacaaacaaattataataggataagttttcttctaaaattagcaaaacatcagctagaatgtttgaataatgttgcacaagggctttcagtatgataatatagcagtatgaaagactatattaacagaatattgcactttattaaagaacatatgacttatcatgtcaactttatagatgactttttagatattaaatgggaaaaggtgagtaacatccatttaaggttttggacaactattattgcttatttagttatttttatcttaagtatctctaccgtaattcttaaccttgtacttctttttcaaggattcttaacgcaaaaccctattatttacttactattttttataactttagtttgtgctttttattttgcttataaatttattacttatactccaaccattgtaaaaaatgctcttcagtatatcaaaaagctcaaaaacgtttaaaataataaagtaatctgtaccttaacactctatcaattatgttttagagtcttttttcataccaaaataactaaaaaggatagttacttaactatcctttttcttttgctaatttttcgcgttctaaacgaagtttacgattaggatttaatgtgttaaagagttcttctaatttttcagcattccagacatcggccgctgaaacaaaattcccatctttatcacgaaatgatatcggtttatctcccataaaaaacctccaatcaagtactgcattaatctacaaattcaaattcgaagttacctatacgaacaatatctccatccttagctccgcgctctcgaagggcttcatcaacgcccataccacgtaactgacgagcaaatttcattattgattcatcgcgttccatatttgtcataacaaagagtttttctagcttatcaccatacaatacccacgttgcatcatcatcacgtgtaatctcaaatggacgttcatcttcgttaaatccatagtatgcttcatcttcttgcatgtcagtttcgtcataaagaagaaactcttctgtattggctaataattcagccgtcgcatccataaggttttctagtccttgatgtgctaaacttgaaattggaaaaatcataggcatgtcatcaaactcatcatagtttgctgctaatttttctttgaatgctgccaaattctcttctgaatcaggcatgtccattttattggcaacaataatttgcggacgttccatcaatcgaagattgtaagtttccaactcattattaattgaaacatagtcatcgtaagggtctcgtccttcacttgccgacatatcaataacatgtagaataacacgtgtacgctcaatatgtctaagaaactgagttcctaatccgacaccttgactagccccttcaatcaaaccaggaagatcagccattgcaaagctatcacctgattttgtacgaaccatccctaaattagggacaattgtcgtaaaatgataggcaccaattttaggctttgctgctgaaacaacactaagtagcgtcgacttcccaactgatgggaaaccaacgagaccaacatcagccaaaatttttaattctaattgtaattcacgttcttcaccaggctccccattttcagcaatttcaggagctggattacgtggggttgcaaagcgaatatttccacgaccaccgcggccacctctggctacaacgaattcctgatcatgctccacaaggtcggtaataaccttacctgtagtagcatcacgaacagttgttccaggtggtaatgacacaataaggtcttctgcacctcgaccgtgcatacctttagtcatccctttttcaccagcttttgctttaaaattacggttatatcgaaaatccatcaaagttcgtaaaccttcgtttactttaaaaatgaccgatccgcctttaccgccatcaccgccccacgggcctccattggggacatatttctcacggcgaaaagcaaccatgccatcaccaccgcgacctgccttaacactaattttggcagtatctaaaaacatactcatttctaaaattcctattctttattctattcagtataaaaaaacgctttacagcgtttctcattacatgattgcactaatagcaccaaataccaaaccaccaactgttactagtaccatcaaaataacaacaaaaagagttagtttttcaaacccagttttttttcgttgtccgttatctccaaaagccactcatgtcacctcatttactgaatatatagttaagtctatattaacacgaaacgtcttatttcgcaaactacaaaccgttagcttaaatatatctttattaaatcaatatatctttattaaatcgcttccatatttccttgtgctttataagagtttatgataaattataaaaaatagtaaatttaaaggagctagtatggttttacaagatttcgacaaccttttaaaaaaatatgcccaattaattatttctaaaggtttaaatgtccaaaaagggcacactctcgctttaacaatcgatgtggaacaagtccacttagcaaggcttttaactgaagccgcttatgaaaagggagcaagtgaagttattgttgattatacagatgattttatcacgcgccagcgactacttcatgcttcagacgaagttctcacgaatgttccacagtataccgttgataaatctttagcactattaaataagaaggctagtcgattagttgtgaaatcttctaaccctaacgctttcgctactgttgatcctaaacgtttatctgaaacaactagagcaaccgctattgccttagaggaacaaagtagagcaatacaagctaataaagtatcttggaacgtggctgcagctgctggtagagaatgggctgcacttgtcttcccagaattaaaaacaagcgaccaacaagttgatgctctttgggataccattttcaaattaaatcgtatttatgaagatgatcctattgctgcttgggacgcacatgaagctaaattattagaaaaagctactagactaaatcaagaacaatttgatgctcttcattataccgcaccaggtacagatttaacgcttggtatgcctaaaaatcatatttgggaggcagccggtagtctcaacgctcagggagagacttttatcgctaatatgcctactgaagaaatcttttcagcacctgattaccgtcgtgcagatgggtatgtgacaagtacaaaacctctcagttatgctggcgttattatcgaaaatatgacatttacctttaaagacggtaaaattatcaatgtcactgcagaaaaagggcaagaaacagtccaacgcttaatcgaggaaaatgatggggcaagatcgcttggggaagttgcacttgtcccacataaaacaccaatttcactatctggactgattttctttaatactttattcgatgaaaatgcctctaatcacctcgctattggaactgcatatgccttcaatgtagaaggaggaacagaaatgacaagtcaagaattggatgaagctggtttaaatcgttcttcaacacatgttgattttatgattggttcagaacaaatggatattgatggtattcgtgcagatggaactgctgtcccaatctttagaaatggcgaatgggctatttaaatataaaaaggaggttagtcctcctttttatatttaataaagtttcattttcttattgtaaaaacttaatgataacagaataatccctcccgtagatgctattacagtatctgagtggctatctcctgttttaggaagttcctttttaggcttactgtggccttttttcccatcatttgcttttgaagatgatgattcatcgcgatccacttcttcttgatcactacttgctttactaaaattcttaatactatcttctgaaattaatacttttgttccactagaaatatccttattattgccaatttctgtcttcgttctaccatcaggcttgttctcttcactaggtgagggttgcgatggttctgttgtaggtggattagttgacggatttgtttctggttcacttgatgaactcgattcattttcagaagaagaaccagtactagactggtctagttcatctgatcttttctcctcagataaggtcgtagtcacgacactcgtgtcagtattcttatcacttgtatcagcataaccgattgatgaataagtagcacatgttaagacagtaagtgctaccatcgttaaaatcttatttttcactttcatattatttcctattttataattccttacatcttcattataatttattacaacataaaaatcgaaaatatgatactaaaaagtgaaaaataggaattattttacattacaatcaacttttctgattcttttttgttacaaagctaaaacaagctaataaaagggttactactaaaactggagataggcttgattctgtatcacctgttttaggaagtgctttttgatatgccattacggatggtttatttttaacagacgatttcatccattttttagagatagatacttgagtaacttgtgaattttcttctaaatttactaatgatgaatgagctttaaagagggagttagtaggctgtattaggccagtagatggtttcacttctttatctattattctttgccatttaacattaaaaccatgatgtttttcaaagaaagttgcaaatttaattaataccatatcatagtttgcacctgccattaacatcgtccctatgggtaaaccagactcagataagtaagtcgggatactgatagctgggagtcctgtcatattagcaatttgtgtaaaaggtgttctacgcaacataggctcccactggcgattaaagagagcaattctttcttcttggctcaagttttccatattataaatcgctcttttatcttcctctgttacatatggatctgtatttagaggggctaaacttgcggtcgttggcgataagaaaataggaaattgcttgtgaagcttctccattgccttacgataatcatccatatgtttttgggcttccataatagatttcttaagttcagccttatctgaattttgataaataacatgaactgcccaagtaataggatcaacgtcttctttagtaaaaccatgtttttttaagtctttttcaattgttgaaaaagctcctcccatgccaatagccaaggttgaataatcacgcattaatgctctaccatcaattggtaagtctatctctgttactttgaatccttgttttcttaagaatgtgacgttgtccataatagcgtttttagcatcttgactaacttctgttcccattggtgatttcaaagtataagcaattggtaaagattttaaatcattaactgatactagcgtttgatcgcttttctttagataagttaataatgtttctgcgtctctagatgacttagttaatggaaaatgaactgctgtactatacgaatctggcttttcattactcaccaatcctcttgttggttttaaacctaccaagcccgtccaagaagatggaatacggatagaaccaccagcatcactaccgctagcaattggcgtcattccgctagcaatggctgctgcacttccaccagaagagccaccagcattatgagcaagatcccaaggattatgcgttagaccgtataatttagaatctgttatattacgccacccatactctggaaagttcgtttgtcctaaaataataaatcctaaatctttatattttttgacatagctactgtcaaatgtgctaatttttccatctgcatagatcaagccattattggtttcaccacctttaatactgtgccctaaccccttgactaacaagggaacacctaaaaacggctgattggtatctttaagttttctagcctcttcaatagcttcttggcgtctagtagtaatgactgcatttaaagatgggttttctttagcaataatatcgtatgccatattaacgagttcctcactagtaacttgaccacttctcaccatgttggctaaatcttgaccatctttttgtttgtaagtctcttcagttaacttagtagaagtactctcaacgacaggacttgattgagttgtttttaaagcatctggagctgaaatatgatgaggcgtgtcaactgttgtaagcgccgcagaattatctggttttacttgacctattacagattgtcctgattctgatacaaattttgcggtaggattactgtcattagtttgaacgatagtatttgtagtaggaactactgaagcacttgtctcagtactattagcatagatactgctagtattcattgcagcagctaacgttaaaaccgtcaccgtattaagaataaagtatttacgtttcatttgatcttccaatctaaaaaagtatacgtttacattataatctaagtgttatcaaattgctaaaatattaactgttgttttatattattgcatatatttttctaatttttctatttcttttattgttagccgtctccattgtccactttctagctgtttatctaattgtagatttcccatccttagacgctttagctctaagacttccttaccacacgcagcaaccatacgtttaacttgatggaattttccttccttaatggtgattttaacaagactctgcttcttcacctgatttacttccacaatttctaataatgctggtaaacaagtaaaatctttcagaataatccctttatcaaatgccaaaatatcgtcttctgtcattatccctgagatttttacctcatagcatttatcaacgtgttttttaggtgataacattttatgcgctaattccccattattagttaataacaaaaggcctgttgtatcaatatctaaacgccccactgggaaaacagctttatctcgagcagttttgtctagcaaatctaacacggttttatgcgaaggatcatccgttgctgatataacacctttgggtttatgaagcatataataaacaaacttttcatatgacactagagttccattatatttaatctcatctctatattcatctacctgtacttttggagatgtctcgctattaccattaacactaatctgcttttttttcaatattaatttgacttgagtacgtgaaccaagtccgcattctactaaaaatttatcaagtctcatttagatgttataacctctttcgataatgatatattgtaaaggatttttccatactcatcctttattactacttttctagtaatactatcattaatatattctcctcgtcaatggaggtcttaatggttttcttaactttaaggaactatcccacataaaaaagatggaaatacatttccatcttttcttattaaaatgagacattatctggatctttgggtttaatacctgaatctagttgtattaaggtagcaatatcatcttcgtttaattgaaaatcaaaaatatcaaggtttgcttcaatatttttgggagtcgctgacttaggtaatggtaaaaagccattatcaagtgaccagcgaagagctacttgcgcaactgatttaccatatttttcagcaatagcttttatagattcattttcaaaaatagcacctgttccaaatggactgtaagcttctaataagatatcatttcctttacagaagcgaaccaaatcctcttgagcacaacctggtgctaggataatttgattaaccataggttttatttcggcagtttcaaataaagcctctaagtgatgtttcatgaaattcgaaacaccaatagcttttacctttccttctttataagcttcttccatcgctttccaagtgcctgcattcccagctttccacgcatcattttcacgaagagcttttggatttggccaatgaatcaaaagaagatcaatataatcaacacctaatttctgcagagattcatcaatagaagctttggctaaatgatagtcatgtttgtcattccaaatcttagttgtcaaaaagatactttctcttgccaaaccactgtctcttatagcacgtccaacactatgttcattaccataaatctgagcagtatcaatatgagtataaccaacttttaaagcatgagtcactgccttataagcttcttcaccttcagttagttgccatgtcccaaaaccaattttaggaatgttaagagtattcgataaagtatatgtttccataacaatctccttttctatgtgacaaaaatgaatttcatagtgaaaaacatctattttaaacatctaaatgatagtttgatatatggtattatcccctccttatgtaaaattatataactttcttcatcaaaaccctatcattttgttcattccctttatttttctgacagtcattagaattttgtagctctactttgctacgatatcgcctgctgagattttttctaaattgtgatatgatagcattaataacaggaggatctaaaatgacaaaagaagatatcaaaaaacaagttcgaagagcttttgattttcgtatggcgattcgtgtttataataataatgatattcctaaagaagatatggagtatattttagatactgcttggttgagtccttcttcagtcggtttagaaggctggcgatttttggtactagatagacaaacaattgcaaaatttcgagataaacttaaggaagttgcttggggagcacaatatcaactagatactgctagtcactttgttttactactagctgaaaaaggtgcttattataacgctgatagcatgattaacagtctcattcgacgtggtctaggtgatccagctgcccttgagagtaggatacctctctacaaatccttccaagaaaacgatatgaaaattgattctgaacgttctctttgggattggacagcaaaacaaacttatatcgcactcggtaatatgatgacggctgctgctatgatcggcgtagattcatgcccaattgaaggatttgactatgaaaaggtcaataatatccttagtaaagaaggattaatagacgataagaaagaagctatttcttgtatggtttcatttggttatcgtttgcgtgaacctaaacattcccgtgctaggaaagaacgccaagaagtcattacttgggttgagtaaatagacagcctaatttataatcaatatttttgaaaagacaattttattttgacataatacgtctaataaagaaataggagagagactatgccatttttacatacttgtattcgcgttaaagatttggacgcctcaattgctttttatcaagaagcacttggttttaaggaagttcgtcgtaatgactttcctgaaaatcaatttactttagtctatatggccctagaggacgaccctagttacgaattagagttaacctataactatgatcacgaagcttatgatttaggaaatgggtatggtcatattgctgttggtgtagacgatttggaaactacttatgatgcccatcagaaagcaggttactctgtaacaaaaatttctggattaccaggtaaacctaatatgttctactttattcaagatccagatggctataaaattgaagttattcgactcagtcaatttaaagctgactaataacatctcatcatattaagttaaggactgaggcaaaaacctagtcctttttatgattaccttataatctttctattttttcccatattatgttaaaatttaagcaagaatgatacggagaattacaaatggctttattatcagttattgtcccttgttataatgaacaagagactgtctcaacttttttaacagaaatcaaaaaagttgaatccgaaatggctcgttacacccattttgaatacattttcgtaaacgatggttctactgatcgtacactcgaacttcttaagaaagcagctaaacaatttgacaatgttcattacctttcattttcacgccattttggtaaagatgctgctttattggctggtttagaacatactactggtgattttatcactgttatggatgttgacttgcaagatccacccactttattaccagaaatgtacctaaaacttcaagaaggttatgatattgtcgctacaaggcgaaaagatcgtaaaggggagccgttgatacgctctctttttgccaagcttttttataaattaatcaatcaagtgtcagatactaaaatggttgatggtgcgcgtgattttcgtctcatgacaaaacaagttgttgacagtattctcgagctaaatgaagtgaatcgcttctcaaaagggattttttcctggattggatatgatgtcgcttatattagttatgagaatcgagaacgaattgcgggtaagacctcatggagtttctttaatctcttaaaatactctctagacggtttcatcaacttctcagaaattccattagctatagctacctggattggaacccttagttcagtactatcacttttagctatcatttttattataattcgaaaattactatttggggatcccgtttcaggttgggcaagcacagttaccattgtactttttatgggtggtattcagttattgtcgctaggaattataggcaaatacatctctaagattttcctagaaactaaaaaacgcccagtctatattgtcaaggaagagggatgaattgaaatctcttagctcacttagctaggagattttatcatagaaaaatattgtatagtaattattgcgaattttgcaaaaaaattatataataaaggagtttttcaaaaatagatggagtatttataatgtcaaaaaataataatgaccacactcaaaaatctgagaatggtatggtacgcggcctagaaaatcgtcacgtacagttaattgcgattgcagggacaatcggaactgggctttttcttggtgcaggtcgttcaattagcctgacgggtccttcaatagttcttgtctatgctatcactggcgctttcatgttcttcatgatgcgtgctattggagagatgctttatcaagatccaaatcagcatacttttattaatttcattaccaaatatttaggacccggttggggatttttctcaacactttcttattggatttccctaatatttatcggtatggcagagattacagccgtaggagagtatgttcaattttggttccctgaatggccatcctggattatccaaattgtttttttagctatcctaagttctatcaacttaattgctgtaaaagcattcggagaaaccgagttttggtttgctatgataaaagttattgcaattcttggtttaatagcaaccggtatctttatggtattgacaaactttgacaccggtcacggataccatgcttcaatctcaaatatcaccaatcattttgaatggttccctaaaggtaaattgaatttcttcatggctttccaaatggtattctttgcttatttagctattgaatttgtcggagtaacaacttctgaaacagctaatccacgtaaagttttaccaaaagcaatccaagaaattccgatgcgtattattttattctacgcaggttcattattagcaattatggccatcttcccatggcaacagttaccagttaatgagtcacctttcgttacagtattcaaactagctgggattaagtgggctgccgctttgattaactttgttgtcctaacgtctgcagcatctgctcttaattctactttgtactcaacagggcgtcatttattccaattggctaatgaatcaccaaatgctcttacaaaagcgttaaaattagaccaattatctcgtcaaagcgttccaagtcgagctattattgcatcagctgtaatcgttggagcttcagcacttatcagtgttttacctggtatttcagatgccttctccttaattactgcatcatcttctggtgtttacatttctatctatgttcttattatgattgcacattggaaatatcgtaaatcacctgattttatggaagatggttataaaatgcctgcctacaaaatcctttcaccaatcacacttctcttcttcctctttgtattcgtttctctcttcttgcaagattcaacatacatcggggctattggagcaaccatctggattattggatttggtttatatagtcacttcaaacataaatcacattaagtctatattattagtgaagttggtcaatcaacttcacttttttcgtccaaaaaaggttaggcaattgcctaaccttttgataatcatcgtgaattatagttttttaactgacgggcaatatcacggttttgctcacgacgtttgatagactctcgcttatcataatcatgttttccttttgccaaacccaatagaactttagcaaaaccatcttttaagtaaacttttagaggtaccagagtcataccagtccctttcagttcatttgatattttttcaatctcacgtttttttagtaataactttcgtgtacgatcaggatcttgattccatatgttaccttgatcatatggtgtaatatgaacattaatcaaccacgcttcaccattttttatttgtgcatatccatctttcaatgtaatacgcgctgcgcggacacttttgatttctgttcctgtcaaaacaattcctgcttctattgtttcaacgatagtatagtcgtgatgcgcttttttattttgtgctacaacgtttccttgacctttaaccatacttaacctttcttagatttccgtttctgacctttcttagcaacgcctttatagaaaggttttttcgtttttttcttggttgaacctgttgttctatcgtctttatgatgatgtgatttgctatccgagttccttttgggttttcgagatgcttttttcttagatgtatttttattcttattatcacgatcagaaattctatgctgatgttctcgtttagaacttctattaggacgaccctcacgcgaacttttacttaccttttcaacaatatcaaaatctgatggtaaataatcaaaatcgatatcaccagtttccttatcagaacgaatcaacttaaccttaatttgttgaccaacacggaaaactttcccagatttctcaccttgaagcgtcagcgtacgttcattaaagtgataatattcaggcaaggtcgttacgtgaatcaatccttcaatagtatttggtaattctacaaacataccaaatttaacaacgcttgcaaccacaccttcaaattcctcaccaacatattcttccatatattcggctttcttcattgcctctacaatacgttcagcatcaatggcacgtctctcaagactagacgtttgagttgcaatttctgggataaggttagcaaaatgatcagctttatccatcgctttatcatcataatcacgaatcatacgatgaactaacaagtctggataacgtcgaatggggctagtaaagtgagtgtaatattccgcagcaagtccataatgtccatggttgtgttcagaatatctagcttgttgcatcgagcgcaataacatcatagataacacttcacttcctggctgcccttgtacttttttcataaagtcctgtaaagcagattgggtgattttagttgctgttccttgaatctgaacaccgaaaacagaagcataatcgatgaatttttgtaatttttcagctttaggctcttcgtgtatacgataaataaatggcagttttagacgagcataatgttcagcaaccgtttcatttgccgccaacataaatgactcaatcatgcgttcagcaatgcctctgttgcgaataacaatatcaactggcattcccttatcattaaccataatttttgcttcagatgtgtcaaaattcagcgctccacgacgcgtacgcatagcttccaaagtatggtgtaaagtgaccatatgctgtactgaggacacaatagactcatattctgagcagatttcctcatcgccagcaataatatcatttacagcggtataagtcatacgataagtggtattaatcactgactgtgtaatttgatgattaacaactctcccattttggtcaatttccataatacaagactgcgttaaacgatcaagatttggatttaatgaacatataccgttagatagacgctctggtaacattggtacaacgcgatctgtgacatatacggacgtaccacgactaagtgcttcacgatttaaggcagagccttcagtaacgtagtatgatacatctgcgatatgaactccaagttcaaaatgaccattatccagtaatttaatatgcacagcatcgtctaaatctttggcgtccgctccatcaatagtgaaagtgacctcttgacgtaaatcaacacgcccaattaaatctttctccgttggagcatctgggatagcattggcttctgcaataacgtcctcaggaaattctgagacgatatccatactttccaagacttctaaaacatcaataccaacatctccttgatgtccaacgatatcacgaacacttgctacgaagtaatcatgtcctcgtgtcggatatttatcaatatctactttgataatttctgttccgtctaaaacgaccggttctttgcgtatataaatcttttgattgattttttgatttttcgatttgatatatcctgcgtatttagggcgctcatcgtctaagacaaacttaccaacaagcgtctttaaactacgttcaacaatattaacaacacgcgcttctgctgcagtcccgttaagacggtccgctggtttctttacaacagcttctaccgtgtcaccatcaatagcataagcaatatcgttttttccgataaacatatcatcttcgtcttggtcaatactaagaaaaccaaatcctgctttatttgctctaaaaagaccccttactgtgatttcctttttcttagcttctttcttttgaagagaaagacttccattatcgtcaaatcttaattgcctgtggctctccaaatttgagattgttttgattaattttggaaatgcttttgcgcctgccatatctagggcagcagctaaatcattaacgctggttttaccgtgttcttccaaatattttataattttttctttcattatttccttttctagtaactttagtcactttattattactctacaaccattctactaacaaaaagtgaggttgggctatcccccatcctcacttatctgtatttagctatcattaatgacttgataaaatagataatactaagccgattagtagccagaaaaagactaaaacacctgtaaaacgttgcataaaagcttcaaatcctcgagctttactacgttcaaaaagggcttcagaaccgctactatcaaaaacattactacttggattcttttgtggttgcatgaaaattgagataatcaataatactgataaaacaagtagaatggtgagtaataggttatacatgttaattcctccactatggtcaaagtacattctaacataaaacttattaagattcaatatgtagtgttacttttctctcctttgggcaatactttggaacctcgattttatcgggatgattacttttattcttactggttaaataattcttactaccacaagagctacactttaaattaattttaactctcacacaatttccttaactctaatatattttctaaaattaataaaacaccaaacaaaattagctaaaacgatgaagctagtcacaaagaaaacccatcggaatcctaaatgaatagaaactgctgaaccgacaaaaggacctaatacttgtcctaaattgctaaacatttggttataactgaaaatccttgataaaccttgtcttggagcaattttagtcaagattgaattaatactcggcatcaaggcacctgttccaaaaccatacaggaatctaataacccctagctgtaatgaagtctgtgccaatgaacataagacatacatgaggaaactatacagtagagctaataatagcaaacgatgattgcctatgcgatccccgattcttcctagctttggactactcagaatactagagaatcccataccagaaacaattaatccggaaacaaacatcaagttttcagtctgtcctaaatgacgaatgtaaagtgttaaaataggtgcaattgattgtgcagaaatttgaataatcatgcttgttacaaacagccctattaaaatttgtaagcttttaacgcttttgaacacttctgtagttggcatggtttcttcgttagaaatgggtttgaaatcttcctttaccataaaaatggtcattaaagtagatattaacaatatggttcccactaataaaaaaacttccctaataccaaaccactctgctaaaagtccccctaaaagtggaccaattaacatacctccagtcactcctgtcgctaaggttcctaaggcatatcctgattcctcttgaggagcttgacttgctatcaaagctgtagagttaggtacatagcctgcaaaaatgccgtttaatatacgtaaaatcagaagtcctgtaacactatgaatgaaagcaagacctcccatagtaaaagtcatcatcaaccctgctcttaccatcatcggttttctaccatatttatcagctaagcgcccccataatggggcaactaaagctgaagacaaggctgataaggatactgataggcctgcataccactctactttgttgctaggtgctcctaattgttctacatataataccataaaaggcataacaagtgaaaagcttgccccagtaaaaaaattaccgagccaagccacttttaaattttgcttccagttaaccgtttcaactgagataaaacatcatcttctttctaaacttttctaccactaactatcttagcagttttattgagatttaacatctatttgagatgttatttccattataatttcctttatgtaactaaacctatgttatcacatgcctctgttattataccacaattaaaattaactttttaaacggaaagtttttggagcaaatactacaactgctaaatagccaataattaaaataacaactataattcctaggcttactaataatattggcatcgttatagatttagtaaaggtaaatagcttatatcccatatagtatataataaaggttaaaatattatacatagcactctttgattttaatccttctgtaaaaggctgtaagaagaaataaagatacaaaaagtaaaaactaaataaaatcattgatatagcttgtgtaattactaatatgataatctgatcaatcttaggggtgaaaaaattaaaataataggttccaaaacatatgtttaaagctacaaaaatggggaaattaagttttatactataaaggaaacgtatttttaaggttgctaagatattttctctttcacgatagaaattatatcttaataatggacgatccaaatgatagaaacaaaattttgaataggattcaccgatatatattagatatcctggaactgcactcaaaaataggaattttgaaaaactatgctcattcatcggaatatttatcttttctttaaaaaatagcaggaaaaggagttctattccaaacagaacacttaaaacagctaaacgtaccaaaattttcctttgcaagtatatactcatccgttttaaaaagatagcgtttaaatatgaaatacctgataaattttcaaatagcaggggagaaagttcactgacatttatatccctatctttcatttcaatcccaagcagctctatattatcaatctttgcaattttctccttcatcgtctcatgcgttagggtaaggtaggtcaagtggttaagtttagaataagtttttaatcgatagtaactaactaaccatatgataagtcctgcaataccggtgtaccatgaaaaaaatggatatggagagaactgtttgccaagaagaaggaaaaagagagaaaggaagactcctataccaatccctaagtaaaataaaatatttagtaaagactctggattctcttggtctttacctctaccatataaaggtaaacagagcaccttgattccaaggcgactacctgctaaaaataaagcaaaagtcaaaccatgccaaaaagcaaagtgatttaaatggaaaaatatgccaaagctcaaacttctaaaaaatagttcactactggcttctaaaagttcagcggattggaaatacctcgatggctcaattctgaaaaggcgaatcatatgagtttgttgcatatcattaggttctataagttttatatagaaatttatgacaattaaaagagaggtaatcaccatcaatgttaaagttagggtaaaaccttcttgcggtaaaatatttaactgcttcatgccacttctaacaaaaaatgataaaacataacaatatagtacgtaacctatggaacgaccaaaacctcttaagaaaaagaaaatgatacgaataaatagtactacaccttttatatcatcggttttaaaccatcggttagggatttttcttcccaaccaggggattttctgaaggtaatataaaaaactattataagctctagcactatcaatctgtaatatagaccatattaatgctttacttgtcatattcatctcccttcaacacttgaagaagacgctcttcgaattgttcatgtttacgatcaatatctaatgtttggagttttcctttgtctaatacagccacaatatcacatagatcttctgctaaggccattatatgagttgataatataataatatgatcctcacttaattccaacaaaaggcgttttattgcaatacttgatacaacatcaactgcagtcagtggctcatctagtaaaattacttttggcttagaaatcatcaggcaaattaatgagagcttactcttcattccatcagaatatcctttgataattctatgacgctctgtttgtcctatttccataaaatctaaataatcatctattgtcattaaatcatctgaaggatgtaaatccatgtaaaattttacaaattcataccctgttaaaaattctggaaggtagttttcggaataaacaataccaatatccttatcggtaagaggatactcgtgattatccttcaataaacaaatggtcccgttgtcagctgcaagatccccataaagtatattaaataaagttgttttcccagcaccattcctacctaagacccctgttattttacctgaataaaatcggtaacttgctcctctcaagacctctgtttcctgaaaccgcttacgaatatctctaattactaactccataaaaactcctttgaaagtaaaccttttatatcattgtactattactgtggtttaatcgcaagttttttaaaactagtgtaataaagacaaaaaatggataaatacattatccatttagtagttctataaacgttgaagagcatccaatatttgctcttttaaagttattaaatcaccattattgtcaataataagactagcgaaactttttttatctgttaaaggcatttggtgtgaaagtcgtaattctgcttcttctcgactgtagttgttacgggccattaatcgttgtaattgtttttctttatcaacaaataccaaccaaatctcatcaaaccattttatatacttttcttcaatcaataaaggaatatccatgaaaaatatctcttctgtttgttttaattggtcgcgctgacatgctaactcttgacgaatgatactattttgtagcctagctgatgtcttcatattgtctggattagcaaaaatcatttgagaaagctttggtctatccaactcaccatcagcatcaagtatctcgggacccaaccattctaataaagcttggtaaagtttcccacccttagcttgcaatttatgaaccacttgatccgcatctatgactttaaaacctgattctcgtattatttttgttaccgttgactttccagaagctatccctcctgtcagtcctattatttttgtcataagcattgacaccgagggcaataatgcgtccctctccctcctacttttatcttcttaattaaacaaccacaccttggacacggttgcccagttttaccatagacctgtaaatacttttgcatcgtaccgtcctctccaagagcattcttatatgttctaatcgtggagccacctttttcgatgcctaaagttaaaatgcgaataatttccttgtgtaataagcttgtttcagattcggtcaattgattagccaaacgctgtgggtgaatttttgctgcccacaagacttcatctacgtaaatatttccaagtcctgctactaatctctgatctaatagtaaaggttttattggctttttggagtttgctaagccttttgaaaaaggctcaaattgaaatgtgtcagcagttggctcaggacctaattttttttgagtaaaataatctttgagagatgatttacgaaccaactcaaatgtcccaaatttacggacatcttggtaaaccaatgtgctgccattagtcaatttgaaataaaggtgaaaatgtttgttatctggtactttatttgggaagagtagatattttccttccatgcgtaaatgtgataccataaccatttcaccaaaatcaaaaagaagatacttccctcgtctcaatacctgttgaattgtttttcctggtagacttatcataaagtcattcaaatcagttttcaccattttagggactttaatcgttatagaagctatttcttgattaactacaagtctttctagtccttttctaacggtttctacttctggtaattctggcataaatatatagtctaaaaatcaatagtcattgcttagagcaataatttccaaacgttcttgatgtcacctgaccattcgatttctattttcctttcttattatcattttgagacaaaagctttaaaaattactcataaacttgcactcattagcattctttattattgccaagtactttttgacaataatgttcattataagtattgtaaaatgaatcttcacctaaatatttaaaaatctgtaaagctttcctcatatcttcttttcctgaagaagtatcaccaagttttaaatgatagtatccagttacatataagaaaacagttttttcatagaaattaacttcatcctgtaacaatgatctaaccttatcaattaagtagtggctatgctcaaagtaagagtgatcaatgctgatgattagacaattaattgctaattgtgtaactaggattttattggttttattttgttctgaataagcaaacgaattaaccatttctttggtcaataaaaataaagtattgtaattaatgagacgtgagcaatttcctaagagaataatttcataatatccccactgctccaccgtaaaaagatagtctgttaagcgtgctaattcttcttgattaggctctattgattgatcaattgaaaaaataagagccttaatcataatcttttcatagtctttatggttatgatcctctaagagagccactaatttagttacatttttttcagcacaatattttcttactcgatttaaaaggataaaaaaatgagtgtgcgccttagaatgaatcgacacaaattcatcaatagtgatgttgagtttgtctaaaatattaagcaaacgactacaagtaatttctgactctcctctctcaaaccttgagatttgtgacttggataggtgctcatctgctaaagaagaaatactaactttttttcctttacgtaatcttcttagtgtttttcctaattctttttccatttttcccactttcacaacaatttaaaagaccctttaaatccattatataatacaagtacaaaatagaaaatcagaaaggagatagtcatgaaaaaaattaacaaagctttgttgttcacattaatcatggatatcctaattatcgttggtggataaaactccccacaaatggttgttatggaatcccattttatttagtttataacaggagaactaatgaagattaaaaaaattattagtggccttgccgcagctttaattatcagttcactatcaactattaactatgaggttaaagctgatgacaccaccagtgagtatcactatatcagtaagcaaaataatgaagagcagcttattagttacatcaaggaacaacatcgtttgctcaatcaatttgttgttgataatgtcaactcattcactcaactaaatgctaatccaactattgaacagttaaatagagctataacattatttaaacaaaaagatgagcaattatttaaccaggtgaaagctggtcatctctctcccagtaactataatgctatcgttaatcaacgtaatgtcattaaccaaactgttcaaaatctgattgaccaaaatcataataagcttcagacaagtcaaaataaagcagctcagctcgtggggcaacgtaatcaggttgttaacaaaattcaagctattttagcaactgtaaactacaactctgtgaattctatacaagaagctgaaaatttatttcattcactcagaaatcaaattgaacctcttgtagctgaagttaataattacaaagctgctatggcaatccttcaacaagaagtagatgccctatcaacagcggctattgaaactgagacttctaaacttgctactctcaaagttagcgaaaatacttctgttcctgcaaacaaagtagaagaaaaaactactcaatcagaagcgtcaggcaataaacaagaagtaactaagagtgaggaaaaacaggctacctctgatgcaaaggcatcacagcctgagtcagctaatattgccgattacgatagtttaaaagaagttttacgaaataatattagcaaccaagtaccacacatcagtgttcaaatggagtttaaaactcaagaacaagttgacgaataccaaaaaaatctcggaagcatcatccgggaaattggagatacacttggaacagcaactgaattcaatgccaaaagtaacattagcacttatactcttggtggacaaatccaacgcattattgtaaaaagcgacatcacaatcacctatactcttaaaggtgacatggtaggattacataaagaatataaacagtttgtagattcttttgtcaaagaaaatattactaacaaaaatatcacaagtgattatgaaaaagctaaagtaattcatgaccacttggttaataattacacttacgcgactgaagaactggcaaccactcgtgaaactgctagtggtatcagtatccatgctcctgaagcactctacaaagataaacgtggtgtttgtcaagcctttgcagtaatgtttaaagatatggctgctactgctggcttatcagtatggtatgtaactggtcaagctggaggtggaaatcacgcttggaacattgttactattaatggcgttaaatattatgttgatacaacatgggataataatataaaaagcaataaatatttccttgttggtaaaacaataatggatgctgatcatcttttggatagtcaatacaatgcattagctaaagatattccagctgatcgccatcaaggtgcataactcaaaaattgtattgagcctggaaaggatatgaaatgtctaaaaagactgattcaaattatctacattccaattgttctgacaagaaaatttggagcgatgaggcgcctctgcaacaggagactatccctaaagacagagattgtgttatcaaacctgtcattactatgacagttgaacatgtggaaatcccattagatgaccaatcttagctctctcctaaaataaaaaggaacactgccatttttgacagtgttcctttttatttaaccaaagtggttttctcattactgatatgattcaaatcatctacaactaattgatcaatcgatttcatggtgtatttccaagcttgcagttgaacatgaaaaacagtctgttggtacatggtatcatgcatatcgtcaatgactttgaaataccttatataatctggtttaatcattaggaacagcatgatcatgagtggtcaaagagctaccagcaccatccagagcgatataaatatctttcatcatatagaagctatttgtataagtaaatctaacagtattgggctccccgcaatacaaaatcacttgggacagctgatccaaagagaacgtctgggtcttttcttctcgataacctattccaaagctcccacttgaagtacttactgaatctgttgcaacagaaaaacaatccctactactagaataatagcacctctaactaataaatgactcattccaacattaacatcttttaacatcatgttcctttcattattttttatttaggaattcgtcatactatattttctcatatttatctaacaaaaaactcgtaattctatataaatcatataaagttacgaactttatttagttaacaataaaataataacattttattcattaaaaaaacgaataacaaaagagccaaaaagctcttttaaactgacaaaaatgtcttagtaatgtgattagtctctcaatcttattacttagagtaaatcaagcaaaaatgttagaaaataaaaaatatatgacaaactattccaaacaatatgctcgccaatcgaataatgaatggattttgtatagtggtgcaaactagcgaaaatcaaacccataccaaaatagacaacaaagtcgacgacagatagaccatgtaagtgagaccagctaaatagtatagaagataagatcacaaccaagggaccactcagggagttcccaaatgttctcatgacaaacaacctgaacgttatctcttcttaaattggggcaataagacagatagtcaataataagacaactcgaaagtagtgattgacctgattcatatcagctattaatccctcctggttttgccttattgggaaaaatgtttttactagtagtgcccagcaaaataaaacgctaaaagcacctattgcaaatagccattttttgaggttagatgatgactcttggtagttactgattggctcagtttttgttagcacataactcaacagaatcatcattataagattaatgccaatccatatactccaactccactctaaccctattgatagtaaactaatcacccaatgcccaagcaattgttattattgtgttgttgcaactttggcaaagatgaatatagcaggatggaaaacagattgtttctgaaacttcaaaggtatcttcttatcacaagctattatttggttatctccataattaatctaaatggagcaatatatcgtttttctactaactgttgacaaataaaaaactcccctttaaagtctggtaacttttcgatttttaccaaaaacttaaggagagtgaggcaagaactaatagaatcttatttaaagttttatgattgggagaacagaacaactatcataattactgaaaaattatgaaaggcatggcaaacaacagatggtcaaatccgctctgttgaaaacaaattttaaatataattcatttcactttctaagtttattaaacatagagtgttcaggagaaatgatacgacctaatgataaaatcattcctatcgtataataaacaacgacaaggtgtaaataaaagtaaattaatatatctgatatacttgtcaaacatcctttcattataataaaagcaactaagataggaataagaatagtacacttaataaataaccaaaattgcttaacaacttgataccatgtgagtacttctgtcgtttgtctttgtttgaagacaaaaaccaatagatcaaagagaaaactccaacagataagtagtatatttttcattaatgttaaatcgtagaaactacctatactaaatagaatcactgcagaaataataacaatgcctaaaaatcttaatatattatgcatatcctcacctcctctactttataggtagcaaatataatcttgagtcatgtgctctcctttatttaagaaggggccaacaagcatgtttggctccctttaattaatttgtgaatataatctcaaaattatgactagttggttttatcctcgtgaattgctttttctgtgcgaatcaagtctcacggtgaacttatctaactcttccccactaacttgcggatctcaaaataaactcattaatactctttttcattatagccaaaatcagctaaatcaagctttttatcacgccagtttttcttgacttttacccaagtctctaggtaaactttatcacctaacataagttcaatatcacggcgcgccatttttcctattttcttgagcatagcaccttgttttccaatgataatgcctttttgactatcacgttcaaccatgatagttgcacgaatatgcactttatcagtttcttcatcacgtttcatggattcgacaacaacagctactgagtgaggaacctcttgttgcgttaaatgaagtaccttctcacgaaccatttctgatactaaaaatcgttccggatgatcagtaatctgatcttctgggaaatattggaaaccttcttcaagattatcagtcaataacttgattagggttggcacattatttccttgaagggcagaaattggcactacttctttaaaatccatttgactacggaagtcatcaatctgttccaaaagttggtctggatgaaccttatcaattttgttgattactaaaataacaggaatcttggcagccttaagacgttcaataatcatatcatcgcctttgcctcgcttttcatcggcaggaaccatgaaaagaactgtttcaacttcacgtaaagtactataagcagattcaaccataaaatcaccaagggcggtctttggtttatgaattcctggggtatcaatgaaaacaatttgctcagtttctgttgtataaatccccataattttattacgtgttgtttgagctttatcactcatgatagcaattttttgtcccataacatggtttaggaaggttgattttccaacatttggacgacctaaaattgctacaaatcctgacttaaatgtcatttcttttctttctccattcaatttattcgtaatacttctcatcataaaagtaaagcaagtatcttgggtataaaaataatcaatcccaccaatacggcaaataaggaaacaactaaaaccgctcctgctgccatatctttagcatttttagccagcatcgagaaatggtaattacttgccaaatcaactacattttcaatagctgaattgataatttcaaaagtaattaccaaaaaaatactcaataaaagaaataaccactccaccatagatacttggaaagtaagaccagcaagtattactaaaatggcagaaaccaaatgcttacgcatatttctttcttctttaaaagctgtaaaaatccctgtaacagcaaattccatgcttgatgttaaggtgcgatttttccattttttgtgattattgtcgtttaagtccataagcagttaaaatttcttcctgtaagctgaacatctctttttcttcttcgggtgtataatgatcataaccgttaatatgcaaaaaaccatgtacagctaaaaaacccatttcacgttcataagagtgaccgtactcttctgcttgttctttagctttatcaatagaaataaaaagttcaccaatataagaatcaaaatcttctagcatctcagcaagttcaggattttcagccagatcttcttcatcaaaagaaatatcaacctcaggcttatattctaaactgataacatcagtcggacgatcggtatctcgatactctaaattcaattcatggctacgttcattagtgacaaacgttacagccatttctttattctctttacctgttttttgtgctgcaaactctaacaaatcaagagtttgctttttgatatcttctgaaacttgtccagtttcatcaatcatttcaacgtacatcttatatagtaagaacgacccaaaacgtttagaaaagataaagtgtaatgcataattctaaataatcgacacatctactttcctaagtttttcacttttatctaaaactagttctcaaaataaaagtgcgttctcttccttccttcaagctattctttcacatcattataccataagagtattaaaaaagggagagaaagctaataatcactattacacacttataatccatttcaataaaattctgacttatgaattagtatttacttcaaaatacaaactttagagcgcctaacttacgtaaaactaattcctaaataaacaaagctacaaatgctataacgattatgacaaatttacatttagaatgtctctttatataaatagatttttgttactttttctcagatgctttatattcgtacacacctaaacaattattaaatttacgaattgttggaagtaaagagcgaagtgtgcctaactcaaatttgctcatctcatctgtaaagttaatcagatttatttgctttaatttagggtctaaatccacaatctcatgaccatctgtgataccaaactgaaattctgtatccatatactttactgtatcatgttgctttcctttattaatcatttccttatgacacaaatcaaattgtgccataaattggctaaatgaatttgtcaggatatgaagaaaagtctctacgtcatcttcttttagaaacattaaaacaccttctgacacgattagaaaaggggcattttggggatttacctcccgtgtccaagtttcatctagggctgattttgctatattagtaactctttcatgctcttcaaaaaataattttcttatctccataacctctggcaaatcaaggttataccacctaatttgtccattatcgactctttcaaaccttgtatcaagtccacaaccaattgaaaggatttgactatttggattttctctaataaattttttgatttctctatccataacgcgaattctagctaatgttgcataaaaagaagcttctgaattatcgaatttatcaaaatcatattctatctgttcaacaattgctaaggatttttgatcattaagtatcggatgtttagccatcgcatctttagccctaatatataaggtgattaataacgtttcagcaacgccgtgtaatgttatcttcattcatctactctcctttatgctattttacttagaaatttggatttctaaaactggatttctttaagtatatcattccaataccgtaagtaaagcatatccccaccatcaaatattccataattttctttttctgtacttcttatgctttctaaaaaaacagtcactaaattattgcaagctactgtttttctttttaataattataaaatatacaaatgagaactccttattttcttaacatttgtttctacaagaatgcctaacaacatatcaataaaagttagaagttctttaaagtcacacctagtatttcccatccttttaacgccccatttggaatgtttgtgaaaaatattcatctaaaattaattggtgttgttcatttacgatcgtaatatttttgacgtcttctttagaaaaatagtccaattgcaatgtttcctcattatgaaaaccttctatattaactggttttggacagcttacttcataaataaaaccgacggtttgtgctttatcgccattgggataagagtcttgaaagttagtataaacatttaacagtctgattggttccactctcaatccagtttcttcgaaaaattctcttttcaatgtatctactgatgactcacctaactccatacatccaccaataattccccaagaattcttatcagctcttaattggagtaagacacgtcccttaccatctgtcaaaataccaccagaatatgttaaaaagatagtctcatgtccaacttttgacctaatgtaggaaatataatcttgtttcattctatcaccttgtttaaactaatatgtacgtattgtagcataaaatatctccttttcaaatcactcatatacacttcttgaatattagaaccgttacctcttttattaacttactattaattattgactaaaaagagatagccctgtagaatggagacacatcaatattttacatttttaggagagcatttatggaccatttcacaaaactctggcaagatttctctaaacttccaaatgttgttgctatagcactcggaggctcacgctctggtgacagttttgaccaatcttccgattatgatttgtatgtttattgtgcagcaactcctgatatcactagtcgtaaacgtatccttaacaagcactgtcattacattgaacttaacaatcattactgggagcttgaagataatggtactttaaacgacggaactgatattgatattctctatcgtaacatagataactttttatcagacttagaagatgtcgttgaacaccacaattctcgaattggatacactacttgtttttggcataacctcatcaattgccaaatactctatgatcctgaaaatcaattacaatcactcaaagagagattcgaagtttcttatcccagtcagttacaaaaacaaattatcattcaaaatcgtaacttattaactggcaagcttccctcttacgataaacaaattataaaagcccttaaacgccaagactttgttagtactcaccatagaactactgctttcttagattcctactttgatattatttttgcacttaataagttgacacatcctggcgaaaaaagaatgatttcctatgctaagaagaatgctacattgcttcctaaacatttcgaagaaaatatcattaaactatgtcatcacaactccaacgaacacactgttaaagaaacattaaacgatataataatgcatctcgacgtcatgcttaaagaaaattttcaacactttataggttaagttgaagtacaccatcataaaaacgcctaaagcattaggcgttttttacatattgacacactctctaacaacgtctcctagtggcaaacatcagtccttatcagattgtagcttgtgactactttctgaatctgaataagcatttattatttcagcaacgacagggtgtcttacaacatcctttgctgataaatgaataaagtcaatctttttgatatttcgtaatttctcaacagcatcaatcaaaccagatttaacattctttggtaagtcaatttggctaacatcgccatttacaatcattttagaattgaagccaagacgtgttaggaacattttcatttgcattatagtggtgttttgcgcttcatctaatatgacaaatgcatcatctaaagtacgaccacgcatgtaagccaatggagcaatttcgatgatttcacgctccattaagcgacttgtttgctctttacctaaaatttgatatagggcatcataaactggtctcaaataaggatcaactttctctttgagatctccaggcaagaaaccaaggctttcaccagcttcaaccgctggtctcgttaagattattcgtttaacttgaccacgctttagtgccgttactgctagagtgactgctaaaaaagtttttcccgttccagcaggcccaataccaaaaacaacatcatgatttttaacgctatcaacgtatattttttgccctaaagtcttaacacggataggcttaccatagctatccttaataatttcttcctcataaagggcaacgaatttatcaattgaaccattttgtgccatggataaggctgttacaacatctgaagtattcacagtcatcccgcggttaacaagcactaataatgcttcaatggttaaccgagcggtttctactgcttcttcagagtcacctaatacctgaacacgttcagttctagcatgaatgataacatctaaattttcttcgattaattttaaatggcgctcattgctgccaaagagtgacatcatatcatctggatgttgtaaagtaatttcgatagagtattcttgcaaattattcttccttttcgtacagtaagtgactacattataacaaaatttcattttctttggtgattttagtcgttgtaaaactaaaaaatcgagaaaaacaagttttctcgattttattttacattataaaagatgagcttctcgaagtaattcttctaaataagttcctctaatttttttcatgcctactttacgcattaaggcaggtattggtaaatccatatcttcaacagatttcttatcattgagatagtataaagattgcaacaagacacgaatatcaaatgctgaattaaagacttctggaacaccacgttcaatatttaagaaagtataaacagcttccatagcagttctaatagaatattccgttgtaaatactgtatctctggatggagattctgcaaaattaccaatgaaggctaggttaacagatccttgtgggataacatctggtcggtcacctttaactcgaggcatgaaataactagtaatgtaaggcatataaacaggaactgtacttacatattgtttatcagataaatcatgaatcttcatttcaggaacacctaagtgatataaccactcttctgtgatttctcgaccagtacattcttcaattggttttttaatataattaccttccacatttgaatagagtccataaatccaaacaattgtttcattttccttttgctctttgaaatgcggttggcgatggatagcaaaactcatcatccaattagaatctgtaactgtaacaatgcctccggtatttactttaccatcatggaggtcacgatgtgttaaacgctctatataaggttcaatagctggatcttttattgttgcagtagcagaaacaaaccatgactcttttggaatatctttgtagaagactttaggatgtccaaattcatcagattgagcagctaagttttcccaaagattccaagaacctcccaaatcggtattaggtttagctacagtatcatgactaccatagttcgtactttcagtgatagaaccattcgttacaaaaacaaaatcatttggagtaagatcaattgtttttgcttcaccaccaactgtgagatgaatagcttttgcaagcttctgaccgttcttaaagtctacggagatattagttaccttgctatcaaattgaacatctacattatgagactctaaataactgatgattggtttcaccatagaatcatattgattatatttattaaattttaatgaagtgaaatcaggcagaccaccaatatgatggataaagcgcatagcatatcgacgcatttcaatcgctgaatgccatttctcaaaggcaaacatagtaccccaataagtccaaaaattactttcaaaaaattcttttgaaaaaacttcttcaatcgtcttagcacctaaagactcttcagtctccatgactagcttaactaactctttggaatgtgttccgagtgtaaaatcaccatcagattctaagcgattcccctgtttatgaatgaggcgacagttagatgaattgggatcatccttgtcaagccaataaaattcatctagataagaagcatctggaacttcgagagaggggatggaacggtacatatcccacatacattcgaagtgattttccatttcacgaccaccacgcgttacaaaaccgatatcaggtcgtttgacaccgtcaagtgatcctccagaaagaggtagttcttcaaaaatatgaatacgttgaccatccatttgaccgtcacgtattaaaaagacagcggcagctaatcctgctaaaccagaaccaacaatataagcggattttttatccacaccttcaggttttcgaggtcttgcaaaggcttcaaaatttccatttgtatatctcataaacaacctccctagggctatattttagatgactatattctactcctttgtgaaaacgattgccattaaaaaacctgcttttcagacagtcttagacaatgtgtccaatttctataacctaaaaaagagattgaaaatacaatctctatattattgttaatgattgagataatcttcccaaatatcatcaaaatctgttaaattaaaggaaaaactggcctcatcttctaaatagcgactaactgtttcaaaatccgaactatgttttggaaaagtggtttcatcaaaagcgtaatctgctaggattgctactggttcatttgattttggatttctttgtgtcatcaaccaactgtaaaatgattttctcaatgccagttctcctctagaaatgcatgtcttctggcactactcaaggcgtaacgagcagggttagtccgatagaatgcttgatgatagtcttctgctgggtaaaaagtatcagcaggctcaatgctggttacaattggtctatcaaatctacccgaagcttgtagcttatcttttgatttttgagcaatctgacgttgctcttcattctcataaaagatgacaggacgataattatccccacgatcttcaaactgaccaaaagcgtctgttggatctgtttgtgcccaatataactcaactaaatctgcataagagattttttcaggattaaaaataatttcaacagcttctgtatgtccagtagttttactacaaacttctttataagttggattctcaacatgtcctccagtgtatccagataaaacagattcaataccatctaattcttcaaatggttgtaccatacaccaaaaacaacctccagcaaaaatcgcacgttccatatcgttctccattctttttaatagatacattataacaaaaaaagccaaaatttcctctcagcttttttctataattagccattaattctagctataactaaaacgacctcgtgagaaaactttaaaagttcaaaagtttataataattctgtacctagctgatcttgtttgatctttttagctttcatgagtcctccaagtgcttttttaaactgacctttggaaattccaaaagtagctttaatttcctctggagaagatttatcatttaaagtcatgaatcctccgttactttctaaatacgttaaaatcatttgtgcgtcattttctaacatttcaaaagaacgaggctttaatgataaatttaaggttctatcaacttctctgaagccaataactcgtgcatccagcacttgccctaaacgaggttcactgtaacgttcactagggtgaataaagccgagcatattattttctggtagataaacaaaagttcctgacaattttaagcgataaacgattgctggccaattttgattttgcatattgttatatgcaggggttgccattcgttgaaacacttcaggatctgcagggagagcccagagacgatcttttttatcaacatctaagcaaacgtagaggcgatcaccttttttaggccaaagttctttcaattcaggaagaacatccaaagaaacaaccacttgcttatctggaagaccagtatcaagaaatactcccaagtctttacgtacctcagtaactgtcccccaaccataatgatctcgagtcgcaaatgtttctttagttgtaagacgtgctttttgttgcatatctgtataggcgaatcctttaaccatttcaccaatgtgatgctctccttctgactttgataatgcaaaggtaaagccatctttttggataaagtaaaaatctttgttttcatcagttactaagcctgttatgactgtcgctaataatgtattcatttttctccttttaaaaaggtaaccgacaaaccaaatccatctggttttgattctatcagttacctccataatcattttattacttgccaatcataataaagatagcaaacgttactattaaacttccaacaattctttttctttattagcagtcatctcatcaatatgttttacagcatcatcagtagccttttgaatatctttttcaagagatttcaagtcatcttctgtaatttctttattcttttcttgcttcttagcttcatccatagcatcacggcgaatattacggatagcaatcttagcattttctccgacttttttcacttctttagctaaatcacgacgtgtttcttctgtcaaagctggaataacaagacgaataactgaaccatcatttgcaggattaatacctaaatctgattcgttaatagcacgctcaatatctttgattgatgatttatcaaatggtgaaattaaaagaacacgagcttcaggtacagtaatagaagctaattggttaaggggggttggcgctccataatactcaacttgaatacgatcaagcaagctagcattagcacgtcctgcacgaatccctgcaaattctcttgataaactttggtgtgattgctcaaaacgctcttgagcttttgtaacgatttccttagtcatattttttatacactcctattcagatgctttgtttgaaacagttgttccgatttgttctccaagaacaacacgcttaatattaccagtctcattcatattgaaaacaacaaggtcaatatcattatccattgaaatagttgatgcggttgcatccatgatttttaaccctcgttttattacttcaacgtgagttaattcatcaaatttgacagcattggcatctttctttggatcagcattataaacaccatctactccatttttagccattaaaattgcttctgcctcaatctcagcagcacgaagcgctgctgttgtatcagttgagaaataaggcgaaccaatacccgctccaaagacaacaatacgattcttctctagatgacgtaaagcacgaccacgtacgtaaggctcagcaacagtttgcattggaatagctgtttgaactctagtatctaccccatattgttgaaggctatcagccattacaagagcattcattactgtccctaacatccctgtataatcagcttgaacacgatccatccctgcttctgctgcaggttctccacgccaaagattacctccaccaatgacaagcgctatttgaacacctgaattgtgtacttcggcaatttcttttgcaatagattgaacggtaggaatgtcaataccgacacccttatctcccgccaatgcttcaccagataacttaattaatatacgttgatatttaggttccactactatgttctccttattttgtctttattattttaccataaaaggcaaaattttaatagagcaatgacactagtaagttgatttctttatcaactcctaaaataagaaaaacataataattcagagattggtcaaacagttagtagaacacgctctcttcaagaattcattatcttctactaaataaccattttttatcagaaagacccggttacagatagcttgacaaattttagggtcatgagaaatcattataaaacttaattcataacggcgttttattttttgtaataaacgtagcattttaatttgagttactgggtctaatccacttaaggattcatcaaaaataataattttaggctttaagagtaaagctctagcgatacaaactctctgtagctgaccaccactaagttgtctagctttatattttagataagttccatctaaacccaccgcttctaatatttgacataattcaaaagttgttttttttccataaaaagcttcattcaaaatttcctcaatactaaaatatggattgaccgaactaagcgcatcttgaaaaacaaggataatctgcgccttaccatctttaggtgtgtaaatttttccttgaaaatatatcgaaccacaagtaggactatctagtcctataatgagtcgggcaaggctacttttaccactgccacttttacccattataccaattatttctcctcttttaagatgaaaatgacagtcctttaaaacctcttgtcgtccaaatgtttttccgacatgattacaaaccaacattaagaatatctccttcatactccatttgcactgtcagtgctttcgtatagttatgttgaggattgcttaaaatagcttgggtttgtccctgttcaacaacttctccctcacttataactaataattgtccccccaggtctctagctaactgataatcatgcgttacagtaatcaaggtttttccattattttgcaattcctgcaaaatagctgatatagtagaacaattatgacaatcaaccgctgaggtcggctcatctaatatgattacctgaggatcaagagataatatagtggctaacataattctttgtagcattcctccactaagctcaaaagggtatttttttaacagggatatcgcatcatctaaatttaaacgtttcatccattctaacgctttagataaggctactctctttgaacatttctcatgactaaggattgtttccaaaatatgcgcttcaattttttgaaaaggattaaacatagacatgggattttgcactaaataggcaatatctcgtccccttaatttctgccactgctttacagttagtttacctaaatcaactcccttaaaaaatatgtttcctctaactgtcataccttgtggaatgtgaccaaccaataattttgccaagagggttttccctgaaccactctcaccaataatagttagcgattctcccatatctattttacaactaaaatctcttagtacagggacctctcctatctgtaatgacaattttcttatttctaactgttccattgtcgtttccaatcttttttatctatggcatcgcctaaagtattaaaggaaaatactgttaaaaaaatcgcaattccaggagataacatcatccaagtagctgtcctaaaatatcctctagcatcgtgcaacatcattccccattctgtgacattaggttgcacaccaatccctaagaaagaaaagccagaaatcattaaaataatatttcctatattcataaggaccataacgaggattggctgatacacaaaaggaaaaatatgttttcttaaaatatgccagactgaaagtcccataatttgcgcatttatcacataaggctctttttttgcactcttaactaaattggtcattaatttagcatagtaaacccattccacaaagacaattgcaaaaattaaattccctagaccatgacctaagattcccacggttgcaagagagagcaaaaagctcggaaaagctaaaataatattagctatccataaaaagaggttttctaactttccttgataccaaccaacaataagacccacaaacataccaatcgttaattccaataagctaataataatagctaaaaacagtgaatatctagcaccataaagcaagcgagataatacatctctacccaattggtcagtccctaacaaatgaacattattgggagccaataatttttgtgataaatctacgtattgtggatcaaagctagatagaataggggcaaaaatggcactaatcactaacaataccagtaagctactcgaaaaataaattctttttgatattatttctcccttgactttcgtaaccgaggatcaacccaattcataaaacactgtgtcataaaattattagctaaaaataaggttccaaaaattagcatacaagcttgtattactggaagatctgaagttcttagactggtcacaaataaacgtcctattccattccatgaaaaaatttcttcaacaataattgatcctgttaataagtaaacccaagtcaagctaagtgctgtcattatcgcaggtaaggcatttctaaggaggtgatgtgtgacaatataacgttcttttactcctcttaatcgggcattttccacatttaaacttctattttcttgactaatagcttttcgaataagggctatgtattgacctacggtagaaaaacttaaggtaatacttggcaaaattaaactttgtaaatcgttacctcctgaaacaggcagaagatttaattttgccgaaaatagcagcatcaacaagtaagcaacccaaaaatttggcatagacacactagaaaaactcaaaaatcgaatcaagtgatcactccgagcagattcatgtaagccagcccacacacctaacggggtagaaatggtaacaattagcaagaaggcactcgtgcctaaaaataaagtagccaaaaaccgttgtaaaaccaaatctaatactggcaacctgagcacataagaatatccaaaatctcctgttaatgctttttggaaccacagccagtactgcttccataatggcttatctaaacctaaatagtgctctgcttcttttagcgcttctggactaacacttatttttgataaacgaaggtaattttctgctgaattaactgttgatagtttgataagaataaatgttagaagtgatatgaaaaacaatgccaaaaaagctgacaatatttttttgatgatcgaactacttagatacattgtttttttctatatagcgtaatgggaatgaattttcttctggcgcaaaacgcatggttttaaaatcacctttcctataaacagaaatcaccgattgataagttaatgggatatatacagcctcatcatgcaataattcaagaaccttcttatagtctctatcaacattttcttccttaggatctactagagctgacttaataagtctatccatttcagttttagttgctagattttctaaagctatattttctggatgtccatgatctgccttggcagttaatgccgacatccaagcatgagggtcccatggtgctccccaagaataggttaacatcatatcaaaattaccctttttagcattagcccaataatcatcttcttccatagcaataagagaaacattaataccgattttacgccattctccttggaaataagttaccaggtctttatcagttgccttagtggcgatataaggaagacgtaaggttagagttttaccatctttttcacgaaccttatcttttcccatcttccaaccagcttgatccaatagctgatttgctttatcaacattatagctataaggatttaacttagcatctgagtgagatgttgattttgaaaaaatagtgtctgctggcttttctgttcctctaaaggtgttcttagcaatagaaaccttgtcaatagcatgattcattgcctgacgaacttttttatcttggaaaatactttccttagcatttagcaacaaaagtcttgttgacataggttgagaaatagctgtgacatatttcttgtccttcgtatattgggcaaaagtgtctaaaccaataatgccattcccatagatcaaatcaacgtcacctgattcgaatgctaaagcacgcgtctgagcatcgggtataacttttacggttacttcttttaattttggtttctttccccagtaattctcattacgtttgaaggtaatatattcattttgctttttacttttcacaacccattgacccgttccaattggtttttttacattcttcttagttgtatcatcacctttagggaaagcgctatcagataaaaagcgaattggtcgaatcatagagagatcatataaagtagcactataagcttgtttcagtttaatttcaaaagtactttgattcaaggcacgataattttccaattgattcgttaaattaaaccaattatgattacctctattagacttcgaaaaaatactatcaaaattacgtttgacattcgcagcattaaagttactgccatcagaatatttagcatttctcaatttaaaagtgtaggtttttccatcttgactaatgctccagcttttcgctaaagctggttcaattttcccattgtcaccatatcgtaccaacccctcataaaccatatcctggataacaaactgatcagggttatagcgatgcggattaacatcaccaaagtcttctccccaagcaagcgtgagtttatcactgtttagtttatgacttttgctatcctgtgaatggcatgcagtcagagtcaccatcaataaacaagtaatgctcaataatatgttacgtctcatttttaccaactttcttttaagtttagttaattatttttttaagcaaacttaattagatcattttagtaatgtcttgtcaagaatcttaaaataaaaaatctacaacgatacaaaatttacttattccctgcgaactcattttaatagattattgctaaagaataatcataatagtcacataccatatcaccaatttcatttttccttattctcatctgttacttaaaacacatcgcacattcattagtctttaagaaggttaatacagataaaaagctatttttcaaaagaaacacatataatatcctttgattattaaaatatatacttaactagttaagtatatagaataaataaaactaggaaggaattcctagttttttattgattaaagtgagttaggatcaactttgataccaacaccttgtgttgttgtaattgaaaggtttgtgatgtaagttccttttgcagtagctggtttagctttaacaataacatcattaaatgctttgaagttatcaactaatttagcatcatcaaatgaaactttaccaataagggcttggacgttacctgctttatcagcacggtaagtaattttaccacctttagactcttcaactgctttagcaacgtccatagttactgtaccagttttagggtttggcatcaagttacgaggtccaaggacacgtccaagacgtccaacaagtgccatcatatctggtgttgcgataacaacatcaaagtcaagccatccaccttggattttagcaactaagtcatcttcaccgacaaagtctgcacctgctgctttagcttcttcagctttagcaccacgagcaaaaacaagaacacgtgaagttttaccagtacctgctggtaaaaccatagcaccacggatttgttggtcagcttttttaacgtcaatgttaaggttataagaaacttcaacagttgcatcaaatttagcaaagttagtttcttttgcaagagctacagcttcttctacgctgtatgctttagtgctatcaattttctcaagagcagcacgtaagtttttactttttttagccattttaaaattctccttgtaatgtggtcaatcgatttgatttaaaatctcccacgtcactcatcaaactacgatgaagtcttgcgggttatgtgggtgtttctgattagtcagtaacagtgaatcccatagaacgagcagtaccttcgatcatacgcattgcagactcaaggtttgcagcgtttaaatctggcattttagtttcagcaatttcttgtacttgcgcacgagtaattgttgcaactttagttttgttaggttcacctgatcctttttcaacacctgcagcttttttcaaaagaacagcagctggtggtgttttagtgatgaaatcaaatgatttgtcttcatatactgagataacaactggaataatcataccagcttgatcagctgtacgagcgttaaactctttagtgaatcccatgatgttgattcctgcttgaccaagtgctggtccaactggtggagctggagttgctttaccagcaggaatttgaagttttacaagtttttcaacttttttagccatttttaaaaatcctcctgttgtggttttggcggtaattagaaatttttacctcccacaggcatgtttataacataccttaccattatactataatcataaataaaagcaatagttttaagccattaatttcattatattttaaatttagtaatttctcaaagtaagttccgtctgccctccaaaaccggaagttagtgtgaaaaggatttttatggtggaattaagtctgagacgtttgggttagaaatgagtttatccatcatgacaaaacacaaacacctaactctcttagaccgtaatgacatccaatctggtttggatagaggagaaacctttaaagccatcgggcttaatctactgaaacaccctactactatcgcaaaagaagtcaaacgaaataagcaactaagagaatcaaccaaagactgcctagactgtccgctactaagaaaagctccctatgtttgtaatgggtgtccaaagaggaggatcaactgtggttacaagaagaccttctatcttgctaagcaagctcaaagaaactatgaaaaacttttagttgaatctagagaaggaatccctttgaacaaagagaccttctggaaaatagatagagtgctttctaatggggtcaagaagggccaacgtatctatcatatcctcaaaaccaacgatctagaagtgagttcttcaaccgtttatcgacacatcaagaaaggctacctatccatcacaccaatcgacctacccagagctgtgaagttcaaaaaaaggcgaaagagcacactccctcctattccaaaagcgattaaagaagggcgacggtacgaggattttatagaacacatgaaccaatcagagctgaactcctggcttgaaatggacacggttattggacggattggtggaaaggtccttctcaccttcaatgtcgccttctgtaacttcatctttgccaaactgatggattctaagacagctatcgaaactgctaaacacatacaggtcattaagaggacactctatgataacaagagagacttcttcgaactctttcctgttatcctaacggataatggtggggaattcgctagagtggatgatattgagatagatgtttgtggacagtctcaactcttcttttgtgaccctaatcggtctgaccagaaagcaagaatcgagaagaatcataccctcgtgagagacatactgcctaaggggacttccttcgacaacttgactcaagaggacattaatctggcactatctcatatcaacagcgttaagagacaggctctaaatggtaaaacggcttatgagctattctcttttacttacggaaaagacatcgcaagtatactcggtattgaggaaattactgcggaagacgtctgccaatctcccaaactattaaaagacaaaatctaacctaatcaactaactgatacaacctaaacgtctcacactaacttcaaccatagcggaacttaatctgaaacgctttcagatgaggatgttttcttgtaccctttttttgcgatttttaactctgaaaacctatgaaatcaagtattataaaaaccaacggaacttagtctgagacggattttcgttggtttttattggtttttatcagactaaattccatttctactagaggtggaacttactttgagaatttagcatattttaaatttctttcccaattccttttacattattacaacaatacttgagattttgaatctcaagtattgttatttatttatcctcaattttcttagggataacaaaaagaattgataagatcgatagactacaaaaaactaggtttaaaattaatccacacaaagctgctttgtgaaaatctgcattaccagaaaaagcatgataaatcgcaattgaagttgctacaccaattgcaccacctagtgaacttgccattttgtaaattccagatgcagaacctactttttcattaggaatactagaaatagctgtatctgttgatggtgtcgcatagatccccaagcctgttccaaataaagcataaccaacaaagactaacacaagatacaaaggtccttgaatattgaccaaagtcattaaaaatatcccaacaaatgtactcatagctcccaaaagcattggcttacgggcaccaaaacgttgtaaaattttctcaccaactcggatagcaattagtacacaaaccaaatagcctaaagacatttcacctgcaacctttggtgttagctggcgaccttgttgcatgtaagtattaataacaatcagagttcctgcaactgcattcagtaagaaatttgatattgtcgcacctaagtaaaatcgattttcaaacagatgaaagtcaataaaactattagatttacgtgtttcaacataataaaacagaacaaatccaataagcatcactgtaaaaagactcaatggaataacgttcatcaatccatgttcctgagccatagatatcccaatatttaacgataacattgaaataataaaaataattaaaccaaggtaatcaaagtgagttttttgtccaacatttttactttctggggttcctaaaattaatagaaaactaactactgatgcgatgattgaaaagataaagacataacgccaacctagagtacttgccaccgctccaccaaaataagaacatagacctgagccaccccacgatccgattgaccagaaactaactgcacgttgtctatctttaccatcatagtacgttttaaccaaggccattgttgatggcataataaaagctgctgccaatccttgaaaaatacgtcccataataaatagcactgctccattagctaaaacaattagtagagaaccaataatatttaagcaaagaccaataaaagtaaatttaactcgaccaagtttatctgctaaaccaccagttacaacaataaataaacctgaaaacaatgccgtacttgagacaccaatatccattgcaccagatgaaatacctaatgatgactgaacatctggtcccatgtttaaaatagactgtgcaaataaccaaaatgatagtacagcgagtacaattcccaccaataatttgttatttcctttgaaattttcctttgtcgttaacatatgttatctattctccttctacaagcatagcaagcgctgctgttgccattgatttagcagataccatcaatgatgattctgcaatttggaattttggatgatgatgtgggtaatatggttgcccctcttcatgtgctccaacatagaagaagcaagctgggattgtttgagcataataggcaaaatcttcagacggcgtttgagggtcgcaatcaatgacatctaaaatttcttttatagcaacagattttaaactatttgcaactttctgtgtcacttcactgttattaactaaaacaggataatcattctgatagtctaactgataactaacaccataagtttgtgctattccatctagaatacgcttaaattcctcctcaacaacacctcgtgtctcttcagacatcacgcgcacatcaccttctaaggttacactatctttgatcacattagcagaacctttaccatcaaaagatccgatagtaactactgctgtgtcaaatggattaactcgacgactgacaatcgtttgcgctgccataacaaaactagaagctgcaacaattgtatcatttgcacgatgtggcatggaaccatgtccacccttaccttgcaaaataactttaaaagtggcacgccctgtttgaatgggacctgcgtgatattgtaccgttccctcttccatcgttgacataacatggataccaaggacagcatcaatgccatctaaacatcctgcttcaatcattgcttttgctccgcctggtggcacctcttcagccggttgatgtaagatacggatatgacctgaaaattctgattttaattcaatcaagctctcagccaaaatcaataaataagctgtatgggcatcatgtccacaagcatgcatgacgcccgctgtttttgaagcaaaagaaagccctgtctcttcctgaattggaagagcatcaaagtcggctctcaaagcaatgtgtttgatgggcttatctgtcgctttatcaccatagatatcaactacgacgccattcataccaccaaattgtgtctgaacatgacagtccttacctttataaaaatctgaaatataagctgctgtttttgtctctttaaatgataattcgggattttcatgtaaatagcgacgaatagcaaccatttgatcacatttttggtcaagtttttcaaataattgatgtcgcaaagatgcattggccatttgctttcctccttaaaatatgaacagttaaaataaggctattattctaacaatctgctcttatatagtctacttttgaaaataattttttacaaataaatttttttagatatttctataactaaatagttatgaatatatcatgttatactactaaattaaatagattgattttagctcaaaatgatagtaaacttatagccataacgtatcataacttattattaatctaaggatatcaaactggttataaagtcttgaaaaatcaacaaaaattaatgtatctagagagtatcgagctatactcaaacatcactaaagccgctgcacacctttttatttctcaaccttacctaagcaaagtgatcaagcaattagaaaatgagttagaaataaaactcatccagagccaaggacaccaaacctttttaacttatgctggacagagatatctattctacctaaaagaaattgatatgattgagcgtcaaatggccaaagaactatatctcatccgttctgataaaaaaggagaaatcacacttgggattaactctggcttagcaagttctattctggcaaatgtacttcccaaatttaacttggagcacccagaaatttctgtcaaattactcgaaaacaatcaaaatatttctgaacaattggtagcgagtggtgatattgacctagctgttgggatggctcctatcctttataaagatggaattgcatcaaccactatttaccgcgacgaattgtttttaatgatacctaccaccagccaactctacaacgctgaaaaacgtggacagattattccttttgaatatcctatttcagttctagacaatgaacctcttatcctaacaccattagagtacggaattggcaaaacaattgcacaattctatgagcttcatcacatgtcattaaatcagatgattacaactagtaccgttcctacagcagctagcctatctttgtcagggatgggagcaacatttgttccacaaactctcattcatcgctatttggataaagagtgcaatgtctaccattttcataagaataagttattttcagagtacattatgatttataaaaaagatgttgaattatctggaattgctctcctactttataaagcttttttaaccaagtagtttcgctaattctattgaaaatcagtttacttcttaccaaaatcggtataaaatagacctatgatatacaaaattattgcttctttatttcttgttttaatccctatattttcacaggttcttgtcaaaatatttaaacttaaaaaatttaacattatgtttccagatgttgcttttcctatttttgtttttttaattccattaatatcatctagtctgttaaaacaaaatcttttaccttactatctgattctcatttcattactggcaatcggaattacaataaagcttctacgaacaaagactcttttttcttataaacgttttttaaaattattttggagatctggctttattctaactttccttttttacctaggattattggttatcatctttatcaaagtacaataaaaagagttggataaattgaactgcaccccaaaagttagacaaaaaatctaacgattggggtgcttttctgatgaaattaagttatgaagataaactagaaatatacgagttaagaaagatcgggatgtcctggtctcagattagtcaacgatatgatgttcgtatctcgaatcttaaatacatgataaaactcatggatcggtatggtgtagaaatcgtcgaaaaaggtagaaatgagtattatccacctgaattaaagcaggaaatgatagataaagtcttgattcatggttgttctcaactctctgtttctcttgattatgctctctctaattgttctatactcacaaattggctttcccaatttaagaaaaatggttatactattgttgagaaaacaagagggagaccgagtaaaatgggacgtaagcgtaagaaaacttgggaagaaatgacagagctcgagcgacttcaggaagaaaatgagcgcttgagaacggagaatgcctttctaaaaaagttgagggatttgcgcttgagggacgaagccttacagagcgaacggcagaaacaattagagaaatggtcacaggaggattccgactagacctcttacttgagataactaagatagctcgtgcaacttactattatcaactaaagaaactgaataaaccaaataaagacaaagcaatcaaatctgacattcaatccatttatgatgaacatagaggaaactatggctatcgtcggatttatttagaactgcgaaatcgtggctttgtcatcaaccacaaaagggtgcaaggcttgatgaaaagtatgggcttgactgctcgtattcgtcgtaagcgcaagtatgcctcttacaaaggtgaggttggtaagaaggctgataacctgattcaacgccagtttgaggggtcgaagccctatgagaagtgctataccgatgtgacggagtttgctttacctgaagggaaactttatctatcgcctgttcttgatggctataacagtgagataattgattttaccctgtctcggtctcctgacttgaaacaggttcaaaccatgcttgagagggcttttcctgcggcttcatacagcgaaaccattctccacagcgaccaaggctggcagtaccagcacaagtcctaccatcaatttctggaggacaaaggcattcgtccttctatgtcacggaaggggaacagtcctgacaacggtatgatggaatctttctttgggattctaaaatctgagatgttctatggcttggagaagtcttacaaatcacttgatgaccttgagcaagctatcacagattacattttttactacaacaacaagcgaatcaaagcaaaactaaaaggacttagtcctgtgcaatacagaactaaatccttcacttaaaataaattgtccaacttttgggggtcagtacaaaatttccaactctttttactttaggtttagaggataaagccctctaacagcattacaggcgtatatagcatcggctgattctaaatcttttaaagttagtggtgcttcaattactttttggtttttaaggagatgacgacgataaatcccattcaaccctccttctgataaatctggggttaaaaaccttccatttttttctaaaacaatattcccaatacttgtttccaatagcaacccctcaggagatacaaatatcttttcattctgaccttcaataatatgtgggcgataagaagttttaaaataagtaaacggggataatttaatagggtagtcttgtacgaccacctctgccgttaaaaacttttttgataaattcactagttgttttacctcaaacgttaccttaccagttttatcaagcattattttcaagcggtaatccttctcatctagctgatgaaggtattttttcagttccctttcgaatttacttttatcaaaagaataagcaaaataagacgctgattcaactaatctctcgacatgttgttgagagaaaagaagtttattttcagtcactcttcctgtagttattaattgaaattttggattgacacgtgttaaaacagctgatttttgacgggtttcttcatattcagaatctgtctggctctcccacgtaatacctccaccaacgccgtaataggcttgttgacctttcatttgtactgtgcgaataggaacgttaaaaatagcttgtccgtctggcatgcaaagtcctatcgtcccacaataaatacctcttggccgtttttccaactcattaataatagccattgttgatatcttaggagctccagtgatagatccacaaggatatagagcttgaaaaatagacataagtgtcacttctggcgataaaactccttcaatagttgatgtcatttgccacacagttgcatactgctccacttgacatagtttttttaccttaactgttccaacatcacagatacggcccatatcgtttcttaataaatcaacaatcatcatattttcagaacgatttttaggatcatttgccaaccaatctcgctccgccacatcttcttgataagtaggctttctagcgcttgttcccttcattggtctagttgttaagacttcatccttcttcttaaagaacaattccgggcttacagataaaatccttttatcgtcgtaggcaatataagcattatatcctgctccttgttctaccattaggcgttcataaacactaaagggatccgagcataattgttggctaagctctagtgtataatttacttgataagtatttccttgtctaatttgtcctttaatattagcaattgcctcttgatattcttgctcagaaacattagcagtccaattatctgctaatctaacattttcataacttaaaggaaaagcttcgttctcacaatctttatgtactgtaaaataagctagatgttctccagccaacttctgttgagaaactttaaaatgtgaatcaaaagcagcagatgcttcataagataaataaccaacaacataataattttgagattgataataatcaacttcttttatcacttctaagacttgttctaaagtatcagctattaattcttttgtaggatttttaaaacgatatctttttcctaattctttgaaatcaataacagtctcaatatgcattcgtaaccttcttcttcatctatttgcttcattataacataaaaaactaatccgacaatttcttgtcagattagttttttcttattcactcggagttggagtcattaaaacttttcgtggcttggttccttctgctggaccaataacccccgctgcttctaattcttccattagtcttgttgctctattgaaaccaacagacaatcggcgttgaatcattgaggcacttgctttttgcgtctctaaaacgagtcccttggcttcttcaaaaagaggatcactttcaggtactccgccgccaccaccagagccgttatctgtttcagatacttctccaggatcaaaggcatcatcatagtcagcctcggcttggtctttgataaaaccaacgatcctttcaacatcatcatctgaaataaaggaaccttgtagtcgtactggatgattctcatcaataggcttaaagagcatgtcaccccgtcccaagagcttttcagcaccattttcatcaaggatcgtacggctatcagtaccacttgaaacagcaaatgcaatacgcgacggaacatttgctttaatcaaaccagaaataacatctacggatggacgttgagttgcaagaatcatatggatacctgcagcacgtgctttttgccccaaacgaataatagcatcttcaacttctttactagcaaccatcatcaagtcagccaattcatctacaatgacaacgattaaaggcaaaggtatttgtttttgctcagaggaagcattaaactcttcaacctttgtattataacctgctatattacgcacaccaattttgctaaataactcgtatcgattttccatttcatcaacaactttttggagtgccttacttgctttacgcggattggttacaacagggattaataaatgtggaatatcattataaacagataattcaaccattttgggatcaatcatcataaacttaacttgatctggacgtgccttcatcaaaatacttgaaataattccattaactgccacagatttacctgaaccagttgaaccagctaccaaaagatgcggcattctagctaagttaaaactgcgagcattgccgttaacagcttttcctagtggtacttctaaaaggttttcaggattggcatcagattgttcccaaagttcgcggaaagaaaccgttgcaatttctgagttaggaacttcaatacctattaatgattttccaggaattggtgtttctatacgcacatcttttgctgcaagagcaagagctaggtcgtcagatagatttgaaatacgattcacacgaactccaactgctggtttaatttcatatttagtaactgatggtccaatttcagcacgttctacttttacatcgataccaaaacttctaaatgtttcttctaaaactctgatattctttcggactaaatccttttctttggattgatttttaggcttatctggtgcaaataaatctatcgttggtaatttataaaccagtgtcgttttaggtgtaaagtcgacattttctatatcactatcatctacatcatcatctaaatcataaaccatttcctcatcattttctctcatattaggaatcggcgaatcatagtcttctaaataaattgtcggctctactggtaaaggatcattttgaggcgatgtctcataagcaaggatctctggctcaaataccggagttgatgtttcacttacctcaggtggtagcgcatcatccaaattgtcctcagcttgatcctctagaatctcacccgtttcagggtctacattaaccgaagctaaataagcttcttcttcagctttttgacgctctatgcgctcttgttcagcgattgcttttttcatctctcgcttagcaaaacgctcctttttattttgctcgtgcttctctgccactttatttttaaaagctctaataaattcgacgatgtcataaacttccagagaactcattaaaaagagacccaaaatgatgaagagaacaccaatcatataggcaccaatattagaaaagagaaaagcaattggcttgtaaatcaaagcacccaacatacctccaccggcaaaaacagtgattttaaattgcattaaatcagacacaattaatcgagcagttgaacgcaaaatttctttatctttcaaaataggcattgagaaaaggtaagcatgccactcaatcaataatcctaaagaagctatcaaaaaacctgctactaagctatctttctttcgcaaccatttaaagaaataaaggtagattaaagttgccgcaataaataagtaagccaagctacctaccataaaacggatgacgttatagactgtaataccaaaaatacctaatctgataataccaaagaagagaataattgttaaaacaagagcagtaatcatcctttgaatagctctttgacgctctatttctgccttagtaggtcttctggttttctttccttttgtttttttcttatttgccataaataccatatttcaagtgaaatacttgttcctcactttctctatcaactcatgctatactattctatcataatttcaacaagtcccccaataggtttactatttacttttataaattatttaaaaatttatgataaaatataatcatcttaataacttaatcaaggagtatgtatgaaaaaaattatttatcttggtttagcctgtgtcagtatattaactttaagtggttgcgagtcaattgagcgttctctaaaaggagaccgttatgttgaccaaaaactagctgaaaactcttcaaaggaagctactgaacaactaaacaaaaaaactaagcaagccttaaaagctgataaaaaagcttttcctcaattggacaaggctgttgccaaaaacgaggcacaagtgcttataaaaacctctaaaggtgatataaatatcaagttatttccaaaatatgctcctttagctgttgaaaattttctaacacatgcaaaagaaggatactataatgggttaagtttccacagagttatcaaagattttatgatacaatctggtgaccctaatggagacgggaccggtggaaaatctatatggaatagcaaagataaaaagaaagattctggaaatggttttgttaatgaaatatccccttacctctacaatatcaggggaagtttagcaatggcaaatgctggagctgatactaatggcagccaattctttatcaatcaaagccagcaagatcattccaaacaactgtcagataaaaaagttcctaaggtgattattaaagcctattcagagggaggaaatccaagtttagatggtggttataccgtctttggacaagtaatctctggcatggaaactgtggataaaattgcttcggtagaagttacaaaatcagatcaaccaaaagaaaaaattactattacaagtatcaaagttattaaagactacaaatttaaataattctatcaaaaatgagactagaacattttctagtctcattttttaacaacactattgtttctttttaaacaaactttgtttaggagaaaataggaaagcaagtaaaaacataaaagtagatgttaaaacaatacttgatcctgcggcaatattaaatgtataaccgatatataaccccagaacagatgctactgctcctaatgcagatgataaaaacaacattgttctgagacttttaacataaagatatgctgttgcagctggtgtaattaaaagtgctacgatcaatattgttcccacactctgcatagctgttactgcaactaatgttaacaaaatcatcaataaataatgataaaaagaaactctcattcccattgattttgctaaaacaggatcaaaagaagtcaataataattctttaaagaagatagtaatcagagtcagtacaattaatcccacaataatagtcatatatttatcactatcttgtactgccaaaatattcccaaaaagaatatgaaagaggtcagttgtactattagcaagtccaattaaaatgatacctaaggctaaaaaggacgaaaaagtaattccaatagcagtatctccttttatgacactattttctttaatataagtaatgataatcgaagacaacaaaccaaagacaatagcacctataaaaaagttaatccctaaaataaaagatatagcaacacctggtagaacagcgtgagaaatagcatcacccatcaaagacattgagcgcaagataataaaacagcctactgcacccgctacaataccaatcacaattgcagttataaaagcattttgcaaaaaatgataagtcaataagccttcaaaaaatttcgtaaacattctagtctccttgtcctaacaaaatagcatcaccgtaagcagcacttaaattctcacgggtaaatgcctgatctattggtccacaagcaattagatgacggttcaaaataattacttgatcaaaataatgatcaactttactcaaatcgtgatggacgactaaaattaattttccggccttacttaatttttttagtaaattaactatgatttgttcactaatggaatcaatccctacaaacggctcatctaaaaaaatgtaatccgcttcttgaacgagacatcttgccataagcatacgttgaaattgtccacctgataaggcattaattggtctattttcaaaccctctcaaaccaacttgatcaatcactcgggatactttttcccagtcagtttttgatagtcgcttgaagaggcctcgttccttatataatcctaaagaaacgcattctccaacagttatagggaattggtaatcaatattagttttttgttcaacatatgctactctccccattaaaggtagcaaatctcccccaatccctgattctccagtagaatcaaccaaaccaagaagagctttcataagcgtagatttccccgccccattaggccctaaaataccaatgattccggagccttctaagcgtaaattaatatcttctagcactaaattattatcataacttacgcttaagtgtttactaataatcatttttcctccaaaagtagaatggagctggttataaaaccagactccacttctctgtatttattaaagctaagtcagtttttagattaggatttcgacattgttacaactcagccttaagcgagaatactacatcattgatttcattatgatttcaatgtcgattctcactcttattttgctaaaccttctgcaatcttatcaagattccatttcatcatagcgtagtagctgtcacccttttgaccttttttagcaattgagtctgtgaagatttctgcgtaaattgggatacctgattctcttgaaacagatttcataggacgcttgtcaacacttgattcaacgaataaagctgaaggtcttacttgttttaatttcttaactaagctagtaatttgatctggtgtaccttcttcttcagtgttaatttcccagatgtatgctgatggaactccataagcttttgagaaatatttaaagcaaccttcactagtaacaattaattttttattagctggaatggcattaaatttagattttgcttctttatccaatttttctaatttagctacataagcatctctgtttttctcataagtagctttgttttttggatctttagcaattaattgcttagcaatattttttgagtaaataataccattttcaaggttcaaccaagcatgtgggtcttctttaccttttccgctttgaccatttagataaataacatcaactccatcgctaaccgcaaagtaatctttgttttctttcttcttagcgttctttattaattttgtaaaccaagcattaccgcctgtttcaagattaattccgttgtaaaaaacaaggtctgcttgagttgttttttcaacgtctgctggtaatggctcatattcatgaggatctttaccaacaggtacaatactatgtaagtcgattttgttaccggctatattttttgttatatctgccaaaatagagttggttacaactacttttaatttttcgtttttggcttgatcctgcttgttagcacaggcacctaagcctaaaaatgctacaaaacatgatacaataactaaccactttttcatcaaaatgctccttttaaaattaatataagttatgtattaaattaagttaacttaattttgatattagcataacctattataaagtatttgtcaaatactttttcagtattttttgatataatggtcttagaaaaatagattttaagaagtataagaaagactgaatatgactccaaataaagcagattacctaaaatgcattcatgaattaggtgaaaaaaacaacaaaatttccaataagaaaatcgctgaaatgatgcaagtctcggctcctgccgtgtcagaaatgattaaaaaaatgataagtgaacaactgattgttaaagataaagatttaggatattatcttaccaaacaaggtttattagttgtttctgacctttaccgtaaacatcgtctagtagaggtatttttagttaaccatttgcactatactgctgatgatattcatgaagaagcggaagttttagaacatactgtatcaacaacttttgttgatcaattagaaaagttgttagactttccacaattttgtccacacggtgggactattcctaaaaagggagagtttttagtagaaattaaccaaatgacattggaccaaattagtcagcttggcacatatgttatcagtcgtgttcatgatgattttcagctactgaaatacctagaacaacaccgtttgcatatcaacgataccattgaattgacacaaattgacccttatgcaaaaacttatcacatcacctataacgatgaaaatctaacaatccctgagcgtatcgcaagtcaaatatatgtatctgctacataaataaaaaagtccgtgtattcattagatacacgggcttttttataatgctttcaaaaatgccattaatacttgggcagagcgtttaccagcttcaatgataaattcatcaaatgtgatattggcatcatgagctgcagtatcactcatagcacgtaccaccacaaagggctttcctgtagcttgagcagcttgggcaattgctgcaccttccatctcgacagctaaaacctgtggaaaatgccccttaataacatcaatcttttcctggccagcaataaaactatccccagttgcaattaaaccaactttactaatcatttcttctttagataaaactgcttcaaaagtggaaacaaaagtcttatccgaatgaaaataaagtggctgcattgacatttgtccatagtcataaccaaaggcggttaaatctacatcgtgataaactaatgtatctgcgacaacgacgtctcctacattcaatcctgttgctactgcaccagctgatcctgtattaataatagcatcaactttaaagctttctactaaaatagcaacactcatcgctgacatgactttcccaacaccagactgtactaaaacaagctcatgttcaccataacgtccactgtaatatacatttgataatactgtctcttgagatttatcctcaagattttccacaaggagttttaactcttcctccatggctgcaataattccaattttcatgatatttccttataatttaaaaattgcataaaacaagagagccaacaaaataagcaaaatgaataaaactaaattcaacttacgttgaaattcatttcgttttgcattctcaatccggcgactcttgtagatatgtttaccgttctcgtcagttagttgctccatgccatcttctgtagaaataattttagtttcttgatctaagattgtttgacctgaaactttttcacctcgatttgaacgttcaatcatatcatctgttaacaatggttttcccattaagaatgacctcccatttttaaaccgtaatattgtaaagcaatgatcgttttcgcatcttgaatcatgcctttttctaccatttgcatacaatcctcataacttaactctagaagctcaaggacctcatcatcatcttgtggcctaggattttcaactttttgtaaatcagtagctagatagaggacgattttctcattacaaaaaccaatagcagtgtagaaactataaagaatttcaagattccctgtgtagccagtctcttcttctaattcccgaagggcagcttcttccttagaacctgactcacccgtctcaagtttccctgctggaatttcgtaagaaataccttcaatagccttacgatactgtttcactaaaacaattttatgctcaggagttaccgccaaagtagcaacagctcctccatgaaaaacaagttcacgtttggattgtcccaatccatttggcaactctacatcatcaacagctactttgataatttgtccatcaaaaacagtttgacgattaattgttttttcttcaaaatccataagaacctcccaaataagtgttacttttgtgaaggatgatgtggttttttattggcatatccttctttattgacttgacgtcctcttccaatagctatgctatcaattggaacattatctgtgatggtagatccagctgctgttaaagcattatcaccaatttcaagtggtgcaatcagagtagaattacttccgataaagacattacttccgatttctgttttaaatttattttgtccatcataattgacagtaatcgtccctgcgccaaagttaacatcacaacctacctctgcattgccgatataagttaaatgacctgccttcgtattctcacctatttgagaaccctttacttcaacgaaattaccaatatgaacaccttttgcaagacttgttcctggtctaatatgcgcataagggcctacggttactccatcagaaataatggattcttcaaccatcgaattagtgatggtaacatcatttccgacttgagcatctactaaataactaccattggttaataaagtacctttaccaatcttcgtctgtccttttaaagtcacattaggctcaattacagattcttctccaatctcaacatcaatatcaatataagcggaatcaggattaaccactgtgaccccattaaccatatgttgacgtgcaattcggtgacgcatcactttttcagcagttgcaagtgctacacgatcattaactcctagactttcgtcaaagtcacgaagtttataggcacctacctttttacccgcttctttgaaaattccaataacatcagttagataatactctccttgagcgttatttgtattaatgtctttaagtgcttcaaatagactttgattatcaaaaacataagttccagtattaatctctttaacctgctgctcaaagtcattagcatccttttgttctacaattttagtaacttcatcatctgaattacggataatacgaccatatccaaatggatttgcagcatcggctgttaagattgttgcaacgtttttatgattgacatgaaaatcaattaagttttttaaactttctccagtaatcaggggtgtatcacctgcaataactagtgtatgtccttttgatgtcgctaattcttcttccgccatcattacagcatggccagttcctagctgttctgtttgcattacaaactctgatttgtcacctaaaacatcacgtacaagctccgccttatgtccaataacagtaacaattttacttggctcaatagcttgcacactacggaaaacatgctcaagcatggtaataccagatactttatgcataacttttggtaaatcagatttcatgcgagttcccttacccgcagctaaaataatggcataatttgacatattaattcctctatctctgaatataattcaacctattatatcataatgccttcaacttatcactaatacccctttaaatccctattacaatagactttagctaaaatagcttacttcaattaggaataaaatagctaccttttggtagctattcaatacatgaaatccgttaattttttcttctctgtttgcaatcagtatttttataaatctatcattgcaatgctcagatggtaaaaacgattagtttaactctgttgaaatttgccacatcacaccaaattggtctactaagtttgcgtaagcaggactccagaaagtttcttgtaactctaactgaacttcttgtgcactcttctttaatttttcataaatttcacgcgcctcctctacgctacccacaataatagcggctgtaacatttttaccagcttgatacacgaaatctggattttcatccgagatttgaagacgaatgccatcaaaaataagctgagcattaatgattaaatccttgcggtcttcaagacagttggggtccatctcttcccatgtcatcatattcactaaatccgcttgaaagacatctttataaaaatcaaccgcttgtcgcccatttccatttgttacgatgtatgtttctagtgctttaaccataagttctcctttttattttacttcacggattgcaaagtaattattgtcattatcggaaaaattaaaaactctcatactccccatatcaacaataggatttgtcataacctcatttgctgttaattcttgatatgtactgtcaatatcagtagtttcaaataaaatagagggagttgctaaatctagctcaggactcatttgagctataattgctttgtcatgtaagacgaagctaacttcactatccaacttcggtgcaactatataggttacataatctccttgtgtctgtttttcaacacgctcaaaacccaccttgtttttccaaaaatctgctgatgcttcaacattgctaacgtagagcattacctgtccaattgatgaaatcattttattatctcactttcggttttattactaattagtataacatacagtatttaaaataagtaaaaaatgactcaaaagagtcatttacttatttcgttaccatatctagaactttcatcaccgttctactatgttctaaagcttgagcagcacgcttaaaatctaaattgctaataataccttcaaaaataacaaattcatcgtgcatgcggtgcctatcaccatttaattgataaacatgactttcttgtccattcatagttaatgaaattttaggcatagtattagttggccctaaaatcgctatagaccccttatcaccttgaatagtagattttacttctgcactacaatcttttgctccaatacagactgttttaaagtgcccatagtctaggactagaactcctgaagtatcaataccacgctctatatttggtaaatactgtgctgttataggttctccaaaaagtccaattactaaatgtaaattataaatattaaggtctctcaacgcacctccacccatttcaggattgaaagctggtgctatttccccacgtttaaaggcatcataacgcgatgaatattgggaataattacattctacaattttaatatctccaaggttgcttaaatgttcttttacaaggtcaaaattaggtaaatattgatttgtaattgcttcgagtaatattagttgcctagtattggcaatagatacaagttcttctaattgacttgcttctaatgtaaatggcttctcacaaatgacatgttttcctgccaagagtgcctccttagcatagtcaaaatgcaagtgattcggcagtccaatatagactgtgtcaatctcctcattgtccaagacagccttatattcactcgtagctagagacatgttatattccttagctagatctttagctgtctccaaacttctaactgttgataagatagcaactagatcaataccttcaattttctgcaagacaggcaaaacttccttaacaatcatacctgtccccaaaaccgctaatttcattcgttaatctcctttgggtaaaccacttggaattcctctaaaactatcctagagtcctcactaaacattaaaccaaactcctcaaaataaggtttaaagaaatcaatgtgagcttttctccaccattctaaagttttatctccttctccttctttaaaagcatggtctgcagagacatctttaaaagggacaatatcaactttagttatttcaataatacagatagcttcatcattgctatccaaaataatatcatatgaaccaacttgtgtaacccttcctcatctaattcatataaatcataggcagaggccgttgcagtttttgtcccatctacaactaactttgccagaagatctggttctgctccaaattgccatgcgtctatctcatcaccgattgaaggattcaaagatttaaacttattccataattcttgtgccttcatattacctccgaagcaattcccacaacaaacttaactgcgttactcatttttctttgtcttttaaatccttctttaacatctaaaatataaacagtttgaccaatccaaacacgtaaataaacagattttattaaaatatcacctgatattcctttaacttcccgctcagtaccatcagatgcttcaaattccgtacgtaataaccaagtattaccacaaccaaattcaatctattttctcatttcaaactccagccaccatcaattttgacaatttcaccttgcattgatctcgcttttcctgaagcaagaaatccagttaattcagcaacttcacttggtttagtccaacgaccaattggcgtctcactagctacccattctgctaatccaccaggttcaaaatcactagcagtcatagcagtttgtacagcacctggcgctataccaaaaatttgaatacaatcttttgcgtaatccaaagccaattgacgtgtgaatcccgcaagggcatgtttagaactagtatatgcagctccaccgccacccgctataaaacttgctattgagcacatattgataataatacctgacttcttttccaccatacgtctaagataatgacgtgttagcctaacagtcacgaaaaaattaatatcaaataggtgttccagttcttcatcacttacttctagaagtggcttgtaggcatctagaatacctgcagtattacacaaaatatcaacagtcggtaccattgtgaatagtggggataaatcagaggataaatccaactttataaagttaaaattaccatttaagttcggtttatccgacttatccacaccatatacttgatacccttgtttcaaaaaatattgagcctgtgcataaccaattccactagcacagcccgtcactaaaacaactttagtcattgacctcgatccaatcctctgctaaaacatcacatggtgttggtgcccacatggaaaaaccttcaccttcaccagtaacattaataagaaaataaggtgtagcctgtagtactttcccattaacttcaagggtatcaaataactgaacataattttcagcgcccccccaacctgtacgtacatattttttctttgcttttaaacctggtaaaatttcttcaaatgtcatattgttctcctttattgtctttaaccattgatatatcaaggtttattgcttatttaaaatcataatttaaagtttcttcgccttttagttcatctaaaggctactattgttttcataggataaaatagtttctggtcatccattattagtaaataatatttcgtctttttcttgttggtcaagaacattatttttgttcttactccttcaattcccacaataaagttatctgcttgctccgtcaacaaaacaggtccattttccactaattcataagaaatacttagttgatttagcacagctataactttttcaaaatcattcgtaattttctccattcttccatagagttagcataactatttgtagactagagaacctaaaattgatacactgtttttcactcaaaaaattttaccttcataatcttcattatacctataacaattttcttttacaaatttgttccccttaaaggaaattgtttttcaaaataggatgtttatactattgtattatcggatgctttatctcgctagtgcaaaatcttctcataacacatttcttccttttcaaaataagtttttgatttacccttaaaagaaaaaccaaacctatcgtaaaatttccttgcgcgtgtattttctgtaaatacccaaagtatcactttattataacctgcttgttgtatctctgatagtacatgattcatcatttgagacccataaccttttccccaaccttctttaagactatgtatacaaatgagttctgcataatcaagcataccatcttctctacttttatcccaccaagccatacaatgaggattgctatctacttccaatatataccccttaccaacctccttgtgtagtagctgttgatacattgttatggcaggttctatttccgtagttttttgaatgatatcctcaggtagtatcttaccaaaagcagctttccagctctccgtttgaatataagctaaattgacttcatctcctaatcttgctctcctgattatgcaagccataactaaaatcctttcaaaaattattattaactgcctgataactactccaattataccattttcgtgatattaatttttattttgaacagttctggttctcatttatcattatatttctaaaattttagatggttttaaacattaacctcagattaggccaattattgataatcactaaaagagcgtagataattacgctcttttagtgattattttatatatatgaatcgctataacttctaagtaacacttgtttcaaaatccttcatttgtttctctctcgtaatatgcccccaaaccatttttttatttttatagccaataacacttgcaaccttaacaaaagttaatacaggatgtaggataagatacctaaaaacagcaatataaaatactttaacaatatctaaaattcctattactagttgctgagaataaatacggtgtaagaaagagcttaatgtaattaaaacacagtaaaagatataaaggctcaccaatgatataaagaatgggatgtttaattgattaaataataaggacaaaaatataatgacaataccaaaacattctataaaaggggtcagtaattcaaataaaatatagtaaatataagaaattgatcctacagctccaaagcgataattggcaaaaatacttttatatttttttaaacattggtacaagccaagataccatcggcgtctctgtttacgtaaatcccctaaattcgttggtgcttgactccaacaaacagcatctgtttcataacaaatacgataaggaatattattattacgacagaagaaatgtaatttcatcaccaactccatatcttctcctagagtctgggtgtcatatcctcccaccgctttaacaaggtctttcttaaaaagaccgaaagcccccgaaataattaaattagctcttaaatagtctaaaaagattcgagctcctaaaaatgatgaatcatactcaagtgcttgtgcacaaggaataattctccaaggcaaacgataagatgctactttcccctgctcaatcttaacaccttgggcaacttggacgagccctcccactgctataaccgtcggatctacctgtatggatttgctaatttgactcaaagaatctacctgcaacatagaatctgcatctagacatagaaaataatcgtaattagcagcattgatccccatatttaaggcatcccctttgccaccattttctttaacaatgagtgtcagtttaaccttaccaacctgtctctgaaagacatctttacaagtttgagtagcaataattgaatcaatcgtattcgagattttcattaatgcaaactcttccttgagaacatctgaagtattgtcactggaaccgtcatccacaacgataatttcatacgcttcataatcaaggtgcaataacgaatcaatcgaactcacaatggttgttgattcattataggctggtacaatagacttcctgcgaaacaaaatatggtacaatagttctatgaattatgaagcaagcaaacaattaactgatgtacgatttaagcgccttgttggtgttcagcgcactacttttgaagagatgttagctgtgttaaaaacagcttatcaacgtaaacacgcaaaaggtggccgaacccctaagttaagcttagaagatctcctcatggctactcttcaatacatgcgagaataccgcacttatgaacaaattgcggctgattttggcattcacgaaagcaacttaatccgtcgaagtcaatgggttgaatcaactcttattcaaagtggttttacgatttcaaaaactcatcttagtgctgaggatacggtgattgtggatgcaacagaggtaaaaatcaatcgtcctaaaaaaatcaactagcgaattattctggtaaaaagaaatgtcatgctatgaaggctcaggcgattgtcacaagccaagggagaattgtttctttggatattgcagtgaactattgccacgatatgaagttgttcaaaatgagtcgcagaaacatcggacaagctgctaaaatcttggcagacagtggttatcaagggatcatgaagatgtattcacaagcgcaaactccgaggaaatcaagcaaacttaagccactaactcttgaagataaaacctataaccatacgctatccaaagagagaatcaaggttgagaatatttttgccaaagtaaaaacgtttaaaatattttcaacaacctatcgaaatcgacgcaaacggtttggattacgaatgaatttgattgctggaatgatcaaccgtgaactaggattttagtttcgcaggaagtctaataattgaaattggaattttttctttatttctagttaaactttttttgcgctcatttttttcatagagatgaacacctccaatgactaatgaaatcactaaaaagctggcataggcaatcaataatactaagaaaatgacttgagatacctttaggaaggtaaaaaataatgccatagaaaatcccctttatttgatatttatatcctttttccgaatacgaagccaactaagcttatctaatcgttgtcttaagatatagtgaatgttaaaaacaataattgctaagcaaatcaaaatgtaaaaatataaaatattatgtaccatatgttctctctctttctttagaccattctttcttaatactataataggagtcttttaaaaaggttttggtatcgggtctctcccaatttttcaaacgataatctgccatctttatcagtgtgttttctttgctattagcacctaatcctaaagcaatgctctcaatttctaactccttcacaccataatgtttaaagtaatcatcgtgaattttttgagatgatggatcagaaaaattcaacaactgccacggaattctgacctctataaagtcctttccaaacgaaatatctgtttgtgaatcaaatgttttttggtgcctatcagttgttcctgttttgagaagaccagtaggatgagttggtaagaacctctctgttgcttttactttttccatgtcttcaacaatctttgtatttctcaataccatatttatctgctcaaaattactactgttcttctttggtgggaaagcataaaaatctttaccgttaagctgtcgaagatagttcgcttttaaggcattatagcgctcttggacaaataattcagacttgccatttggatcaatagacaatacaaagtcactagatttagaaaatgtgaccttactaccattcatttttctactaccagattttggtgtaatatctattggtaataatcgtttttcttttagtttttcaggttttgttttaatcgcaaggtagagatagctttcatcactgctagcatataagtcatctcctgttgcactagtcatcagaggatgtttccactctcctttgcctcttttaccatcaacttgataatgatgttttgcgtttttaaagcctaataaaccataaccttgattaaatacttgtgcatccccccataggaattgactatgtttatttgtggcgaaagatgtattccacgcccttgcattccaatcgtcttgccatgcattgatagtcgctccaaaactaccggatgatataaaagattcataatcttctagtaaacgctgaccttgttctttttcattaatcggcagaggacgtttatcaatttctttttgggcaatacctctcgctgtcgaatagccataacccgtgactagaacagggattttgtgataagcatttagcagtttaacgtatccctgtgacaaagaaagttctttaatcttttgtctatcttctttactgatattctctttatcaaataatagataatccttgtatcgaggatggaaatcaatagctttatatgctgcaaacatacctgctttaacatttgaattagcttgaatattttctacatttagttgtacgtatttaggagcctgtgcctcaaatggttttcgataatgaaaagggtctgttgttggtgagtttgaaaaactaatcaaatgttgccaaccatatttagctgtctcataatgtgtcaattcatccattacttgagctagcatgacctcaaatggattagctgccacagaagttttaaaataacgtcctttatattgcgtttttttctcttgatgattagtataagcgacagtaccactattccaatcatcccctacgacataaccaagtacccaaggactaagatcataatgataatgacggctacccaaatcagtattccatacttgcttacgcccatggagaatatccacaacgccttttgcttctcgttttaaataccccctataattatcattaaaagctgttatagaagcattattgcgataagaatctatacgtattccttgcaacaaatacagtggcctctttgatgctttgttgtggtgatataaggcatcgtaaaatgcaacattcatcggtaccttgactcttacagtatttgcccccatgttggaaattaaatggaaccattcacgatacgttttttgagtaataggaaaatcgttgtgatgataacccgctaaggaagactcaacgtctactcctttaacaacaaaaggtttattggtgggcttgtgaagtacagtatcacctttaacaacaaagttagttcttgtattttcttttaataagccctttggtaaatacaaactaccatcaaagtaatacaaataataaatagagctaaacaaaatagttaaaagggctacaatacttagatattttttcataatgttctactccagtaaagtattagtatttttcgatggtgcactatattgatacaaggtctcaatatttctatccatccatctgccacgctttttgataaaatcttttaattgttctactgatttgtgataacttgtcacattgcgttcagtaggaatcaaataattccttggatcagtattctttaaatcaaagacatagccccattttttataatttcgatcaatagctggacctaaaaaatgccttgtctcgtctatgtaattagataaatattctgtcgctagaactccctttcgtaattctttatagcgatgaacaaccaggtctataaatgctttgtccttaatgagcatattgaaccacggtgcatccgtcaaggtaaaatctgcctcatcaacacgtccttcaatttgattatcaaaagcattattaaaatcccaaactactagttttgctctatcacgaagatctttatatagataggttgaaaatttacccgcatccacatttctaaaaaattcattgatgacaaaataatttgcaaatgattctctatcaatatatttaggatattgtgaaaaatcataagaataaaggactttttcaatatgattgatgtccttattaataaactctaattgttttgatgtcaatctttgtttacctggatatttcacatcaagagctgagataccagactggtgtgtataatgtacatagttatctaacttttgctttgccttatgttcacgatcccaagcaacgatataaggtgttttatgcaactttttatcacttttttcaatgggaactcgttgctcaccttgttcgatattctcaactgctagatatactccctgatactcaccattgacaaataactcacagtagcgaacgtttggggcataggacataatctcaccagcaatattataactcagataatttcttaataatgttctgtctagaaagggaccatgcaatacccactccgattctttaggcattcctgctaatcgatgcttcttttcctttaacttattagtaacaaacttaactttcaatgacttcttatcaaagtaacgagaggtatttcctctatatgatattaacccttttgtcctaattctcggcttttctgataaatgatgtgatctacttggagaatcccgtaattcgatatcaacattaatattatccctagctttgacatattttccgccttcttttgtaacaagaggaataacttgttgctttgtatcaatgctgataatgggcaaatgggttttaaatcctgttaaatcactcttcgcatctacctgctttatacgatgatgatgtattctctcgatgtgatgcttaggaatccaaaaatagaaaaataagaatagaaaaagacctataagggttgtgccgtaaataaccttccctctcataagtctacccattgatttcgtcgctttggctaacaatgttgaaataatcaatatttcccaattggtacactttttcagttaactgattatctacatggagttgcttatcgtaatcttttctagagatttcgaaaatcatttcaatagtattagttgttgaatttttaacacgctgaacagcttttccgtcaaaatattggaagaaaattccttctaaatcaacttctagtgttctatcgcacttcacaatcaataacatacgattctcgtttttaacacgtcccataacccataataagataaagataacgctacttcctaatgcagctaccacatagtcaccgacaccacaacagataccaacaactatggtccaaaaaatataaactgtatctcttgaatcttttatggctgtcctaaaacgaacaactgacaaggcaccgaccatacccaatgacaaggctacattattaccaataacggtcattactgttgcagtcaagaccgtcaatgtcattaatgaaacattaaactttttactataggcagttccactatgcgtataagcataggaaacataaataactacactcaataaagctgctacaagaatatgtaaaatcatatcttgaaaacttaaatttccactttgctctagactatttcgtaataggtctttcatttttttgttatcctctcacatttaataataattaacgtatatactttttcactaaaaacgataatgtttactaacagctcttcctaaacaatacttactcgctgaaagttcacttctatctaccgaatctaagagttctttaatataagacaataaaaatccattatatttaacttctaaaataacaagataaggatctaataaataattttgatttaaatcctctgagaaaatatcataactagcctctgtacctattatatggtggtcaaaggtgattcggatattgttttccttagcaacaaaagcttttctttggtactcaataaccgttttaggttgataaagttgcgttgttatccttgaataacactccgcagcaaatgtatccggataatttaataaaacactattgttaccattaatcagcgcttgagcatctgtcttgcttaattttagagagcgctttttttgattagcaccttgtttttgtttcatttctaatttcgcaaaattgctttgactaccataattgcgcaaacgaatctttcttcgtatctcaacaccatcttccttttcttgccaatcaacatcttctaaagaatcaaagtatagcgaacggatagtatagccgtcgtctgaactatgcgaatcgagcgtcattacttgggaaaatttcttagataaaagatagtaatcttcaagtgatattaaatattttttttcctgtctaagaacttcgttcatcactcacctatgtttaattaaatattaatttatatataaatattaacaataaattaaacaaaaataaatatatcagaaattatacaccttgtcaacaggaaaatatataatgtatattttttttatacgaaggcatttcaaactttatttttatactataaatatgattgttacgctcatttaaacctagaagaaaaatgtatattttcaatccacagctgttataaaataatttttaaaaagtgtttatatcttagtttaatcacaccttactacaatctatatatcatttaaaaaaatctgatataaaaaaggctaaaactaagttttaacctttttgacatatctataaaattgaaatagtgctatccttcaaatttctctaaatcaaatgcttggcctttttgtttatctgacagcaccaaagaaaatactataccaatcaacattggaactagccaccccattgaaatagtatgaaaggggaggaatccaactaactgagttaatgttttttcttgccattgtcccgctagaacctcaacaaacgacactaaagtgacaagaccaattgtcaaagacattcccttttttgaaagcggcaaccacttattaatcaaaataattaagacaataacaataacaatcggatacaataaagttagcacaggaactgaaaaagtaattacagcatttaaaccaagattagcaattaaaaagccaatcaaagtaaaaacagtagcaaataatttataattcccaaaacgaaagttcttatcaaaaaattcagatactgacacaataagcccaactgttgttgtaaagcatgtcaatgttaccataatactcaagaaataacgaccaaaatttccaaataatttataagatgcttgtgataatacataagctcctttattaacatttgggtcagctaaaatatcagctgggacaggaaacttattccctaaaaaacctaagccaatatataaaatactaaatgctaaactagtaacaattccaacaatccaaatggttgataaatattcttttttagttttaaaaccaaactttttaagcgtttctgttgctactagacaaaaagcaactgctgcaagtgcatcaagtgtattatagcctgctaagacaccacttccaaacgcttttcctgcatagtcagcactcgccttagcactctccaagtttccataagcaatagctccaacaacaaccaaagagagaattaaaaaggcaaaaacaggcgttaagatttttccaacactatctaatataccatttggtctaatagcgagataataagctgcagcaaaaaaacaggctgtaaaacacaaaagagcaatcggactatgccctacaattggagcaaccccaatttcaaaagaaaccgttgctgttctaggaatagcaaaaagtggaccaatagttaggtagagtataactaaaaatgttaaagaaaaccacggactaaatttttccgacatctctgtcttataaccaccattagttagtgtgcctagtaggagggtaataatagctaatccaactcctgacaaacaaaatcctaaaatcgctggccagaaatcttgtccagatgctacacctaatgctggtggaaaaatgaggttccctgcaccaaagaagataccaaataagagtaatcccgttaaaaagcctttttttaccataagcaaccattagtgtaaataatctatttacaccctttccataaattctccttatcaaattctatctaaatgcttagaatcgatgtcttttattatatcaaaaataaaaataaattctaggtcattttcataattttccaactattcagtcacttttttcttgaaaacaaaaaaagagcataatgctcttttcgattaaccaataattgatccatttgccactgctgaatcgaccgtcaacactgtcaatttaccatcatgttctgctgagagaatcatgccttgactgacatattttttcatcattttacgtggtttgaggttagcaacaatttggagttttttccctactaactcttgttcatttgggtaaaattttgcaatccctgataagatttgacgatggccctcatcaccagcatctagacggaaacgaagaagtttatcagaaccttccactttctcaacttcaattacttctgcaacgcggatttcaacagcgtcaaaatcctcaaacttgatttgacctttgcttgatgtcaattcaacttcttcaggaacccactccttttccactggtgcttttccagcattcatttgttctttgatataagtaatttcgtcttccatatccaaccttgggaaaattggtgaaccttttgcaacaactcgaacaccttctggtagatcagcaaaagtcaatttttcaagatcgaatgttgcccctaaaccaagttgttccataatggcatcggaagtttccatcatgaacggttgaatgaggtgagcaacaacacgtagactagcaactaaatgactcattacagctgctaacttatcacgatctgtttcgtcttttgcaagtacccacggtgctgtttcatcaatatatttgttagttcgtgaaataagattccatacagcttcaagggcacgtgggaaatccaccgcttccatttgtttatgatagttttcaatactatctgtcgcaacagaagctaaatcggcatcaaagtcagttgcaacagcaaaccttggtacttctccatcgaaatacttgttaaccatagcaatagtgcggttgagaaggtttcctaaatcattagcaagttcatagttaatacgtccaacataatcttctggcgtaaaagttccgtctgaaccaacaggcaatgaacgcatgagataataacggagtggatcaagaccaaaacgctctactaacatttctggataaacgacattcccttttgatttagacattttaccatcttgcatcacaaaccaaccatgagcaactagacgttttggtaatggcaaatccagcgccatcaacatgataggccaataaatagagtggaaacgaagaatatctttaccaatcatatgaatgtctgctggccaaaatttatgatattgactgagatcgtcagaccaaccataaccaagagcagaaatatagttcatcaaagcatcaatccagacataaataacatgttttggatttgatggtacctgaactccccatgtgtaagttgtacgagacactgctaaatcttctaaacctggttctataaagtttttaagcatttcattcatacgaccatctggctgaataaattctggatgctcagcgtagtacgcttttaaacgatctgcatatttgctcatgcggaagaaataagattcttcagaaactttttcaacttcatgaccagatggcgcaacaccaccaatcatattaccgttttcgtcacgataaacttctgctaattggctttcagtaaaaaattcttcatctgaaacagaataccatccggtatactcaccaagatagatgtccccttgtgccaacaattgttcaaaaattttagcaaccgcttcttcatggtaagtatctgttgtacggatgaatttgtcataggaaatatctaaaagttcccataatgttttgacactttcagccatgccatcaacatattcctgtggtgtaatgcctgcttcttcagccttttgttgaattttctgaccatgctcatcaagaccagtcaaatactgaacatcaaagcccatcatgcgtttgtaacgtgccaaaacatcacatgctatcgttgtataggcagaaccgatgtgcaatttacctgatgggtaataaattggggtagtaatgtaaaatgattttttttctgtcatgatttctcctataagccaccctaatgagaggtgttttttatcatgatacattataacataaaatctttttcaactggatatatctctgaataatatatctacttttgctataataaaggtattaaaaatagagagttaatatatggttaatacaaaaacacttctcccctacaaaactatgccggtttggactgcacagtctattccaaaggcatttttagaaaagcataatactaaggaaggcacctgggcaaaactaaccattctaagtggttctttagtattttaccagttatctcctgatggagaggaaatctcgcggcatatttttgatgctagtagtgatattccttttgttgatccacaagtctggcataaagtttcgccgaatagtccagacttaagttgctatctaactttttactgccaaaaagaagattacttccataaaaaatatggtctcacgcgcacacattctgaggttatcgccagtgcacctctcttatctgagaagagtaatatattagaccttgggtgtggtcaagggcgaaactcactttatttatcgctgctgggacatcaagtgacttctgtcgattcaaacggacagagccttgtagctttagaaaatatggcattagaagaagagcttccttacaatataaaaaggtatgatattaatactgctgctattgaagggcactatgattttattttatcaactgtggtatttatgtttttaaatcccgactgcatttctgatattattttacaaatgcaatcacatactcagattggaggatacaatcttatcgtttctgctatggataccgctgaaaatccttgcccgcttccattcccttttaccttcaaagaaggacaattgaaatcttattacaatgactgggaaatcatcaaatataatgaaaatttaggtgaattgcacagggtggatgaaaacggtaatcgcttaaaattacagtttgcgactttattagctcgaaaattaagatcataaaagtgagtagaaatctactcacttttatctttggttaggtaataagtatattctaaacccatacataattatcctataaaatatatagagatgatatttcaaatcattattgtaacaatcagctttagtatagctcttcaacataaaacgccatacattaggagtgcctttctacttgtaggttataaaattcatggcctaacagcaagttgacatataaaagaggaattaatattaatgataagctccattcgcccagtttacttgaaaaataagtcgagcaaacaacaccaaagataaatcctccaataataataatcgtatttctagcaattaagaaaatatcagaatttttttcgtaaagtccctttgttaataaataagcagcattcttgatattaccagtcatcatcatattagcataaggtgctcctctgagcgatttaaaggtatctacttgtattgaagcaaagaaggctagtcctgccacagtaaacgacgatggtaagaaaggagtcaatataattgttactatagcaacctgtgtcaacgcaaaactagataataggtaccagtgcagttgatgtttattcgcccaacgattcatgaaataagtaaacgattgacctaacatgaaaaccattataggtagcaaaaaagcaagcgcttgactataatgcttattactaagatgaatagcaaaagataacaaattccctgtttgtacacctgcaaaacgttttccttgtgttacataagtaaaagcattgatataacctgaaataaaacagagtgcaaccgcacacctgagcccttcatatatttgatattgacggtgagactttttagacatattttcctctaactttatggcaaacaaaaataagactgggcaatcttgctcagcactttttttctaatagattggtttaaaatagtattaatattagcactagctagcctaacagttctaaataaattattaagcaatgataaatgtagttttagtatatcataacctcagcattgaagcaatctcactttatgaaaggataaagaaaatctcataagtcatttacccttaatttgaagtttaattagttacttttaattttactaccaaaaaacttgcaccattcttaacatttgttacaataaatacaacctattaggaggtcagtacagattatgcacagcactatttataaatgtcatcattgccgttatctaatttataaaagttttaaagatatctttccttttgctctcattttttcttggattgaaatccttcaaaaactcgttatatcagatgattcttttttagctcaaacaacaaagtccagtatttataaaaacgagtggttatatacggtttccaatactctttatgatttatctcatttactaatctactttatggctagttattttgtggctagtttagtatggagagacttatctaaccaaactaaagaaagtttttctgcaagtttacttggctttgccactgtttggttgcttctaacttcagttgttccaggtacagattatcactatcctagccaacccatttggcttatgctggctttgatttcgtatctttttatctttttaactcgactgcttcaaaatcgacatcatattttccagtatagtatgttagctatactactattaatctcttctattttgtcacatatcttatatcgttatcctaatattgatttagaataccttatacaaaatcacttttctcaatggctgggtgatgggccacatcaattaattcctattatgctttggtctatcttagctatttttctaaccttatcaggtctttttgtaccagatattttatttcgtccttactcctatttttcagtagttagcgaaaatttaaatgctgccttgagccaacatacagataaaatcccttatctgtataccttttatactgttaaaaatagctttgctatgtttggcggtattggaatcctattatccttatttttagcagttttatatgaaagtagaaaactacaatcgaagaattactataaattgacattactgaccttaactcctcttatttttgatcaaaatttaccatttttagtaggtctacctgtcattttacaaccaatattattcattccgatggtattaacaactatctttgcagaggcttttggagctcttatgctctacctaaaatttgtcgaccctgcagtttatactgtcccaagtggtacacctagtctactatttggctttcttgcttcaaatggggattggcgttaccttccagtcactgcaattattctagttgttggcttctttatttatcgtccgtttgtcaaaatcgctttcgctaaggaggagcaatatgaaaaaattacttagatggcttcctcctgtacttttcattattatccttataggaatgactatcttaggtaagtcctatatcaataaagtaacagctcacaaaataaaactctataactctcgaatgactcctactattttaattccaggatccagtgctactcaagaacgatttaacagcatgttagcacagctcaaccaaatgggagaaaaacatagcgttttaaagttaactgtcaaaaaagacaatagcattatctacaatggacaaattagcggcaatgaccacaaaccctacattgtcattggatttgaaaataatgaagatggttatagtaacatcaaaaaacaaacaaaatggctacagattgctatgaatgatcttcagaagaaatataaatttaaacgttttaacgctatcggtcattcaaatggtggcttatcatggactattttcctagaagattattacgactctgatgaatttgatatgaaatcattgttaacaatgggaacaccttttaactttgaagaaagtaacacctcaaatcatactcaaatgcttaaagatttaatcagtaataaaggaaatattccatcaagtctcatggtatacaatttggcaggaactaattcatatgatggtgataaaattgttccatttgctagtgtggagactggtaaatatattttccaagaaaccgctaaacactatacccaactaacagtaactggtaataatgctacacattctgacttgcctgataatcctgaagttatccaatatgtcgcagaaaaaattcttaaaaatgagaaaggtaaattaccaaaacctcactaaagctgtaaaatagcaacgcctctggtattttgatataatatattgcgaattaaactaaataaaaaaggatattattatgaaactcatttcatggaatattgattccctcaatgcggcattaacaagtgaatcaacacgtgctttaatgtcacgccaagttattgatactttagttgctgaagatgccgacatcattgcgattcaagaaactaaactgtctgccaaaggacctactaaaaaacatttggaagtacttgaaacttacttcccagaatatgatttggtttggcgatcatcagtcgaacctgctcgtaagggctatgctggtacaatgttcttatatcgtaaagggttaaatcctattgttagcttccctgaaatcgatgctcctactacaatggataatgaaggtcgcattattactctcgaattggaaaactgctatatcacacaggtctatactccaaatgcaggtgatggcctaaagcgcttagctgaccgtcaaatatgggatattaaatatgctgagtatttagcaacattggatagtcaaaaacctgttctagcaacaggtgactataacgtagcccacaaggaaatagacctagctaatcctagcagtaatcgtcgttctgctggattcacagctgaagagcgccaaggctttacaaatctactagccaaaggttttacagatacttttcgttaccttcatggcgatgttccaaatgtttatagctggtgggcacaacgaagtcgtacatccaaaatcaacaatacagggtggagaattgattattggctaacaagtaaccgtgtcgcagataaaattaccaagtcagaaatgattcattctggtgatcgtcaagatcatacaccaattattttggagattgaactataaaccaaaaaaagatgattgagttataactcaatcatctttttatactaagttgaggtctttatacttagtacggtagccaatctgaagaattttattatctttaactagcaatggacgcttaataagcattccatccgatgccaataagtccaaagcttggtcaagagttaaatcatcaaatttatcttttaagcctaattctctgtaagaatttcctgaagtattgaaaaactttttaaggtcataaggcgaattctctaacaattcttttaataacgaaactttgggaggattgctttttatatcaatcgcttcaaaagtcaagccgagttcagttaactctttttttgctgaacgacaagtggtacatttggggtattcataaaacgtatacatattatttctccttttcgtattctaataaccaagattttctttctaagccaccagcataaccagttaattgaccatatcttcctaaaacacggtgacaaggtataattagagaaatagaatttttacctattgctcctccaacagcctgtgcagattgacaatttagctctttcgctaattctccataagttttggtatctccaaaagggattttctgtaattcctgccatactctcgtctgaaatgctgtccctctcaatgataatggaatactaggtaaattttgctgtgaaaaataagcatctaaccacttcttaccaagtaaagtataggaatttgacatattaacaatttcctcttggttgactgctagcatatcatatttttgcccaacaaaataaagccctgataaacctagattgtctgctagaaggcgaatttctccaagaggggactgatagaattcttgatataacatatgataagcataacttaaaaagccatgaaaagcaattcatgactttttagttctttattgttgttttgcaattaaacgtacacggacgatattctcatcaccttcaaattcttcaattaaagtagaaatcttgttattatccgtttcatctaaatctattagtgtgtaggcgtagtcaccctttgaacggttaataatgttatcaatatttatacctaactctgatacagcagttgaaattttagccacaatgttaggaacattcttgttaattaaagtaatacgaaatggtgcggtttgaatttgatgtacattggggaaattaactgaattagtgatttctcctgtctccataaaacaacgaatggtttgacttgccataatagcacaatttagctctgcctcatctgttgatccgcctacatgaggaaagactgtaattcctttttggtttaataattctttgtctccaaaatcagtaatatagcgcttgacaacaccagtttctatcgcttcaaatagctcttggttattgactaattctgcacgagcaaagttgataatcgtagttccttttttcatgattgaaaaagctttcgcatcaaaagtatgcttagtttcatttgttaagggaacatgaattgtgatatagtcacaagtttcaaaaatatccttaatctctttaaccctttgaacatggcttgaaatattccaagctgtttcaattgaaacatagggatcataaccaagaactgtcattcctaagcgtctagcatcattcgcaattctagctccaatggcaccaaggccgataactcccaatttttttcctgcaatttcattaccagcaaaagctttctttcctgcttcaatttgtttgggaatatctgttccagttagagtattaacccatcggttagctcctaaataatcacgagctgaaagtaataaggcagcaatgaccgcttcttttacagcattagcatttgcacctggggtattaaacacgactattccctgtgcacttgcctcttcaataggaatattatttgttcctgcacccgccctagcaatagctttgaggttacttgggaaatcctgattatgcaaattttgactacgaataatataggcatcaggattttctgacatatccccatcaatctggaaacgattccctaactcttgtaaaccaatttgattaatattattaaatgttttgacactaaaaaccattctttttcactaaggttatctctttagtcatcattgaccaaaataacccctttctttttttcttacatgggatttctttcatcaatctcacgatagatgctcgtttctcccttttcttttatcttctgataagccaatcgtaccccatctagaggtactttaccacaatattgatagcctaatttatttagaatatgctgcatagtgacatttttttcatgagtatcgcaacgaaaatcaggtcctttatgaccttcaattaacccttgaaggaatgtctgtgctagtcctctaccacgaaattgatttgagatcgcaatacgatgaaatgtaagatagcgatggttatcatggagccattttccctcataaatagcatcataaacctcttcatgaccatcaatgacagccgcataagtcgctagcatcccatcttcaataccaacccaagcataaccgttcaagatatcatcaataatatcgttacgattagggtatccatcttctttttgccattgatcacttcctgttttagcaatttcggcacgcgcttcctcaataagaagcataatttggtcaatttcatttggaaaagctaatctgatttgcattatattacccacttttatatattatagactataataacggtttaattttctttcgtgataacatttactatgtattttctgcttcaaatgttttcataaaatcaattaattcgatgacaccttgtttaggaaaggcattataaaggctagctctcataccacctaccgaacgatgtcctttaatatttttaaatccacgttctgtcgcttcctttacaaatttttcatctaaatctttattaatagttatgaaaggaatgttacatagagaacgactctttttatctctgacaggattactataaaattctgaggaatcaatataatcatagagaagtcctgatttttcacgattagctttttccatagcatcaacaccacctagacttttcacccattcaaagactaatttagcaatgtaaatactgtaagcaggcggcgtattataaagagaaccagcatctgactgaatcttataatccaacattgatgataaagttggttcctcattaatcatatcttcacggataataactaccgttacaccagcaggtccaatatttttttgagctcctgcataaatcattgcaaaatcttctactttatattttacagctaatatattagaagacatatccgcaataacaggcacttcattagttttaggaatatcataaagcgatgttccttcaatggtattatttgttgtcacatgaacataggcagctttaggatcaatctctttttcatcaaactctggaatataatcataaactgattcttctgatgaagctaatagaattggttcaaaaggaattgtttttgatagttttacagcctctgtataagcttttttccccccacgaaccagcaacatgatagtaagctttacgccctctggcaatattcaagggaatcatactaaactgtaaggatgcaccaccttgtaaaaagattactttataattatccggaattcccatcaaatctcttaagtaacgctcagcacctttgataatatcatcaaactctttggagcggtgcgatacctccaaaacactcatactagacccttgataattaaggagttcagattgggcttttacaagcactggttttggtaagactgcaggacctgcagaaaaattataaattgtcatataacacctccatataattgtgtaagattatagcacagtattttgaatattgtaaagatttttttgattaattttgctttttattcgtgatataatggtaaaggcgaacaatcaagtttaaaggagtaatttatgattttgagggaattttgtgcagagaatttaacagacttaaccagattagataaagctattatttcacgtgtcgagctttgtgataaccttgctgtcggaggcactactcctagctacggtgttatcaaagaagctaatcaatatttacatgaaaaaggtattagtgtcgctgttatgattcgtccccgtggaggaaattttgtatacaatgatttagaattacgtattatggaagaggatatcctacgtgctgttgagttagaatcagatgctcttgttttgggaatattaacttcaaataatcatattgatactgaagccattgaacaacttctacctgctacccaaggtttgccacttgtttttcatatggcatttgatgttatcccgaaatctgaccaaaaaaaatcaatagatcaattagttgctttaggctttacaaggattctcctacatggttcatctaatggcgaaccaattatagaaaatatcaaacatatcaaagcattagttgaatatgctaataatcgtattgaaattatggttggcggcggtgtgactgctgaaaactatcaatatatttgccaagaaactggggttaaacaagcccatggtactagaataactcaataaaaaattcgaaacagggctataagtttctttagtatatttactactaagttctctcatgttttctaaaacctgaaagaaccggaataagagcataccatcttttataacctactctcagaaataaaatccaatttgcaatggtattcaaaagagctgaaattaaaaattttaaggaaattggaagtatcttacttctttattccaatagctaaatcggagattataaaaggttgccaaatttttctttggcaacctttttatattattacttataaatcatggaaactagcatagagttcttgtctattgagattaaattcttttgctactttttttatcgcttgattagttttatcaccattagcgatatattcttttactaatactagtggatcttgttggctactgtctttcactcgctcggtatctctcttaccatcaacaataattaagcattcacctttgagagggaccttttcaatatgctctaaaagttgactaatggttcctctttgatactcttcatagagtttcgtcaattcgcgtactaaaacaacttggcgatctccgtaaatctctttcatgtgttttagcgtatcagagactcgaaacggtgactcataaaagatttgtgtttcagggtaatcttgctttgtttcaaagaaagttatttgttgacctttcttacgaggtaagaagccataaaaaatatgaggttgtggagctaaacctgaagcgatgagagcagtaataccagcgctagctcctggtatagatacaactgggatatccccttcaatagcagccttgacaaggtcatgtcctgggtcagaaatagagggcattcctgcatcagatacttgggctaaagatttcccttcttttaacaaatcaattaacccagagattttatcgtaagcattgtgttcgtgaaaactaatttgtttagtagtaatatcaaagtgcttgagtaaaagtcccgtatttcgtgtatcctctgcacaaataaaatcaacttctcttaaaatcctaatggcacgaaaagtcatatcatctagattaccaattggagttgggactagatagagtgttccgtaatgtatatttgatttaaaacttttttgaacttgcatttccatcaatctctatataataattcaatacaaaaagcacattcttcgtcattttcacgacgttgaccatagaaagtattacaaatgtgaaagccatcattgtaaatgccttcgagtaattctcttccttgtttagaatttttaactgcagtttctgtttctgcttcaataacgctcagacgctcacgaagtttaccattttcaatgcgtagaacagtattctcctccaataatttttggatttgttttttcatagtctcaatttcagacaacccaactaataaattttgtgaaaaatcatcaaaggcatcaaacaagtcttttttatccattcactcttcctctctgcgcgtattattttctaagaaagcaccatatactctaaactattttgaaaactaacattgctcttccacatttgctgagctctataagtattttctaaatcataaagttggccttctttagccagcattattgtcagccattgaaaaacaaatgcctgatcatttttatctacaacttgcgatgtcaagcgagatacttctaaataagcagtttgcctatcttttgccaaagtcgtcacaaactgttgacttaaattcaagtaatctaataactttttgttagtcaacaatatttctaaatgtttaggatcgtctgctacttgagctaataagctagcttgtgattttagcaatcctgcttgttcagcttgatgaaccaacatgtccaattgttttggaaaacgaaaaatttgcgttctactcttaattgttggcaaaacattgttttcatcattagtcaataagatgacataagatgaactttgaggttcttcaataaatttcaaaagactgttggctgcattgacatgcattttttcgcaatctttgatgataaagacctgtgatttcccttcgaaacctgatcttgaaaaatctttagtcagctcttttatagtctctgtcttaataagttgcccctgtggttctatgattttaacatctgaaaattccccattagcgattaaacgacaggctctacactcttgacatggtaaaccactctggcgcttttcacagaactgactttgtgctaaataaagtgccatatctagacttgcaaaatttcccgaaaaaagataggcatgactcatcctatctgactgtaaaatagtattaaacttttccagcaatttgggttgtgttcgctttaaatccatgacctttgtacttcctgattcattggttgatacgatctaaaataatagagaatgtctcagctattacttcatctagctgttgggaggcatcaatcgtcacaatgcggtttggctccgaatccgccaattcaaggtaaccttgacggacgcgttgatgcatatctaattgctcgagatctagacgatttacctccctttgaacacttttttgaatacgctctaaacctacttcagaaggaacatcaaaatataaagttaaatcaggtttatgactatcagtcgcatagtcattaagccattttatatgtgacttatctaatcctcttcctgatccctgataggcaacagaactatcaataaaacgatccattaggactattttcccttcttctagagctgggagtaccttttccactagatgttggcgtcgagcagccatgtaaagcaatagctctgtttttttatccatttgcgtgtgtttaacatctaaaataatatgacgaatttcttctgaaatagttacgccaccaggctctctggtggtgagaatatcttgtgataatttttctctgagcaagggtaaaacagcttctaaaacggttgttttacccgcaccatctgggccctcaaaagaaatcattagtccttttttcatggtacatcctttatttataattactactattctatcaaaatttatcaaaaaaagacacccacaacttgattgtgcatgtctgatatttttaagagtaatttctcaaagtaagttccgtctgccctccaaaaccggaagttagtgtgaaaaggatttttatggtggaattaagtctgagacgtttgggttagaaatgagtttatccatcatgacaaaacacaaacacctaactctcttagaccgtaatgacatccaatctggtttggatagaggagaaacctttaaagccatcgggcttaatctactgaaacaccctactactatcgcaaaagaagtcaaacgaaataagcaactaagagaatcaaccaaagactgcctagactgtccgctactaagaaaagctccctatgtttgtaatgggtgtccaaagaggaggatcaactgtggttacaagaagaccttctatcttgctaagcaagctcaaagaaactatgaaaaacttttagttgaatctagagaaggaatccctttgaacaaagagaccttctggaaaatagatagagtgctttctaatgggggtcaagaagggccaacgtatctatcatatcctcaaaaccaacgatctagaagtgagttcttcaaccgtttatcgacacatcaagaaaggctacctatccatcacaccaatcgacctacccagagctgtgaagttcaaaaaaaggcgaaagagcacactccctcctattccaaaagcgattaaagaagggcgacggtacgaggattttatagaacacatgaaccaatcagagctgaactcctggcttgaaatggacacggttattggacggattggtggaaaggtccttctcaccttcaatgtcgccttctgtaacttcatctttgccaaactgatggattctaagacagctatcgaaactgctaaacacatacaggtcattaagaggacactctatgataacaagagagacttcttcgaactctttcctgttatcctaacggataatggtggggaattcgctagagtggatgatattgagatagatgtttgtggacagtctcaactcttcttttgtgaccctaatcggtctgaccagaaagcaagaatcgagaagaatcataccctcgtgagagacatactgcctaaggggacttccttcgacaacttgactcaagaggacattaatctggcactatctcatatcaacagcgttaagagacaggctctaaatggtaaaacggcttatgagctattctcttttacttacggaaaagacatcgcaagtatactcggtattgaggaaattactgcggaagacgtctgccaatctcccaaactattaaaagacaaaatctaacctaatcaactaactgatacaacctaaacgtctcacactaacttcaaccatagcggaacttaatctgaaacgctttcagatgaggatgttttcttgtaccctttttttgcgatttttaactctgaaaacctatgaaatcaagtattataaaaaccaacgaaacttagtctgagacggattttcgttggtttttattggtttttatcagactaaattccatttctactagaggtggaacttactttgagaatttagctgatatttttaagaaagtggttttttcatggtcttttctaaagtttccacaataacatcatcaaatactagttcttgttttaaaacatccttgtcagcgtatccttctagttgtatctcgaccgctttcttacctgcttttcgttcaataatgactaaacgtttaacacttaaatttgcactagaaagacgatttaggacttttgatagtacccctatcccctcatcagctaatataaccaagcgataactttcttgaccataccccgcaatttcaaggaaggctttaaaaacatccctatccgtgacaatcccataaagttgtccattatcaactactggtaaaacaccgatctttcgagacatcatcaaataaatagcgtcctcaaggctagcatactgtgaaacagtcacaatatctttaatcataatatctcgaatttttgtcttattaagaagatagttcatctcatatatagaaagactggttgctttagaaggttgtgcttctgccattgtcccttctgtcactaaccccactagctgatcattttcaacaactggcaaacgccttaagtggtgttctctcaataaatcagcagcttctgcaactgtagtatctggagagacataaactaatttttttgtcataaaatctttcactggcatacctgactcctctaaatattatccacctaagtaagctttacgaacttgatctgaaactagtaattccttacctgtccctgataaaacaaccttcccagtctctagaacatatgctttatcagcaatcgtcagagctttatttgcattttgttcaactaaaagaactgtagtcccttgttttttgatgtcttcaatgatattaaaaatttcttgaataaaaattggagctaggcccattgacggttcatctaaaagtaataatttaggacgactcatcaatgcacgccccatagcgagcatttgctgctcaccacctgataaggttgctgcatcttggtttttacgttcttctaagcgaggaaaacgatcaaacactttttttaacattttttgattttgttcacgatccttttgaagaaaggctcccatttctaaattttccataacagacaaacttgagaaaacgtggcgcccttctggaacctgagctaaaccattgccaacaatttttctagctgctaacttatgtataggtttccccataaaagaaatagaaccctgacttggtcttactaaaccagaaattgtcctcaaaattgatgtctttcctgcaccattggctccaattaaggttacaacctcaccttggttaacttcaaacgagacatcattcaccgcttgaataacaccatagtgaatagatagattttctactttcaacatggtcattatagctcaccccccaagtatgcttctataacacgtttattatttttaatttcttcaggtgtcccgtgagcaatcagacgaccatattccaatacataaattctctctgttacttgcataaccaagttcatatcatgttcaatcagcataatagtaatatcaaaatcactctttatttgactaattaactgcgtcaattctgcagtttcttgaggattcattcctgccgcgggctcatccaaaaacaatatttttggttctgttgctaaagcacgaacaatttctaaacgccgttgttttccataagggaggttcttagcaagagcatcttgatatgctttcaaaccaaaaatctctaatagctccagtgcctttttccttaaggctttttcactatgatagtatttgggtaatcgtaaaaaactagcaataggatgtgataagtgatgattactgagtcctactagtacattgtctaaaacagtcatatttttaaaaagtcggatattttgaaaagttctacctaaacctaaagaagctattttagctggtttcctcccatttaatatcttaccatcaattgatattgtccctttactaggaaggtatactcctgttaagagattaaaaagcgttgtcttacccgcaccgttggggccgattaagccaattaattcacctttatgtaatttcatcgaaacatcacctacagcagttaggccaccgaaatgtttacttaaattttttacttcaagaagtgccatctaattgcctcccttactcgtcttacgaaatagatgagatagagttaactctttcgttcctaataaaccgctaggtctaaaaatcataattaaaatcagggctaaagcatagataatcattcgaacagaagcgtagtcttgtagtaacatattcaataatcctaataaaattgctgctaaaactgtccctgtcattgaacctaaaccacctaaaacaacaataattaaaacattgacagacatcataaatgaaaagtcttttggcataacagttccaacgtagccagcctgtaaactaccagcgatagaagctaaaatagctccaaaaacaaaaacaattactttcacttttgttgtatccacacccatagactctgctgcaatttcatcttctcgtatagcaattgtattacgccctaagggactacgcaaaaaattcattgcaaggataaggctcacaactgccaccccataaactaaagaccaggttgtaaaaggcggaatccccatgatacccgcagcaccattcgtaatatcacctccattaaccaacaaaatacggataatctcagcaacacctaaagtagctatagctaaataatcaccttttagtctcaaagtaggaattcctacacctaaggcaatacctcctgcaacaagagttccaacaagtatagctatcaaaaaacctacataagttggcattttaacgccgataatagcaactgcataagcgccaatagccatgaaacctgcatgtcctagtgaaaactgtcccgaacaacctacaattaggttcaaaccaactgctaaaataacattaatcccaattgtttcaataatttgaatatgatagaggttaaatatacccatagatattagcacgctaatcaagagataatctaacactactatagctaaccaagataaaattgatttcatattttctttcatgcctagaccttctccttaatattttttccaagaattcctgctggacggatcaagaaaatgagaattaaaatagcataaacgataccatctcgaaaatctgacacaccaagtgcagtcgctaaagtttctaaaatgccaataacaaaaccaccgatagccgctcccggaatgataccaataccacctaagacagctgcaacaaatgctttcaaccctggagttacccccataagaggttgaacagaattataataaagcccaatcagtactccacctgctccagctaaagcagaccccagcgcaaatgtaaaactaatggtacggttaacattaattcccatcaattgtgcggcatcgctatccactgataaagctctcatagctttccccattttagttttttgaacgatgaactgtaaagtaagcattagtaatagcgcaatacctaaaatgatgagctgaacattggttatagttatcggtcctaaattatatttaacagtatgaatggcttgcggaaatgccctagtatccgctccaacaaggtataccatcccgtactccaaaagaaaagaaacaccaatagctgtaattaacgcggcaattctagttgattttctcagtggacgataagctaaatattcaattacaacacctaggaaagcagaccccagcattgcaattaataaagctaggaaaaaattaagatgaagatgattaatcaaataatagcccatgaaagcgcccatcatatagatgtccccatgagcaaaattaatcagcttaataatgccatataccatagtatatcctaaggcaagtaaagcatatatggatcctaagataagtccattaacgagctgttgaagcatattataaccatactttctattatatattattgtcgaattattctgaaaaattactttttaaaaaaggggagctgaaaattaaactcccatttttctagagaatacttattttgctgaaataatgttaacgctacttgtttttccatcctctaatttgacaacgtaagctgatttaacaacattgtgatttttatcaatagacattttccctgtcacacctttaaaatctttcagcttagctaaagcttttttaatatcaattgaagttttagctcctttagcagatttagctgccatatacacagcgtcgtatgataaagccgagaacatggatggttcttcaccatatgccttaacgtaatgatcatggaaagctttagctttggttgatccttgtgtagtgaaacctgtcaaataataaacgtttgaagctcctacaggtgttgccgattgcacaaatttcggactatcaaaaccatcaggcccaagaaccggtttagagatacctaaatcacgcgcttgcttaactattaatcctgtctcggtatagtaacctggcatcacaatagcatcatattctttccctttcaacttagtcaatgacgcttggaaatcagtatcaccagcggagaatgtcatactatcaacaatttttccactataactttccttaaatgattttgctaccccctttgagtaatctgatgaattatcataaaatagaacaacttttttagctttaaggttgtctgtagcatactgagacaatagctttccttgataattatcgacaaaagtagctcggaagaaatactgatttaaggtttttccatcagaaccatagactaaattgtcttgtgtcgcagcaggtgcaatcattggaactgctgctgcatttacttttggagttgaagatgcagctgcacccgatgttgctggtccgataatgacattagctcctttggtaaccaagtttgtggcaaccgttgctgcctctgcattttctgatttattatcctgtgataggacttttaacttcttgccgccaacccctccagcagcattaatttcttttactgctaagtcagctccattcttcattgaatttccatacgaagaaacgtttcctgataattcccagttataccctaccttaatatctttccctatttttgttcctgtcgaagatgctcctcctccgacatttccacatgctgctaaaagaactgtactagctaaaacaagcgctcctaaactaagtctcttttccatatttttctccttttttgaaaatggtaactaaaataatacagaattatcagaatattgtcaatagtttttaaattgtttttttgaaaattatagaaactaaataaaaaagaaggacatctgaactccttctttctaataactactagtaaatatcttaacgatataagtttccaacaaaatcctgatcaatatcatcaattgctgataaccgaacatccttaacaaattttaaatgttttatctctttactaacgctaacaatatcctctttattaacataaatgactagatatcttaatctacgagaatgataatgaacatctccgtatttatataatttacgagcgtcacgattatagtaaagataaacgctcattcctaaacgctcttgtttattcaataattttttcctttctgcgtcatatctgtaattactaagattataacataattccaacaaataaaaaaagagttggtaaactcaaccacgccgtacgcatgaaaactttctcttcatccttttgtgcccggacatcaattttgaaaagattcctttttaaatcaatgatctgcttagcctctttctccaaataattggactaaataatcttccaaatggacagaaatataccgttgtttgcgacgataactgaggtcttttttaggaaataccatcactttgagaaaatataagcacatttttcggataagatttaggttaaatgcggctcttttatccaatgtctgatgatgatcttcatgataaacaacgtccaataaccagtgcatactctctatctgccaatgacctcgtacacaattggcaaatgtgaggacatccggcttaaagctaaagataaaataacgattctcttgactcagctgaccatccttatcaatcgtgttacgagtcatcccaataccacgtaacttatgccatttgggatggttttgacacaaccatttgatatcggaagacacccagtattctctaacttcaatctgtcccctagatttttcaacagtctgataatactgcgcattttcttggagttcttccaataagttgacatcactaaaataaagagcaatatcatcataaagtgtttcttgatttcctttgacggctaagcaatagtctgctttaccttttataatcgtatcaacgatagccgtctgcgtgcccattgcgtctatcgttacaatgcttttacggatatcaattgtccgcaataactgaggaatggcaacaatttcattacttttctcctcaaccgctacctgtcccaaactaagatgatgacccccatcataagccgttacaatatgaacaggcttctgatttttacctcgattgcctcgaatcgttttaccgtccactgaaatcagttgatgaacggcatctaagcttgtcaatgattgctcaaattgaactttaagctcttttaaacggtctgaattaacaagactaatcacacgctctaaggtatcatgagacggacaaccttcactcaaatcaacgtaggtcgcaaacaatggttcattcatttcaataaaatcttccatctccttccaggtttcaatgccagctaactgacaaacaaagacaagaaatagaatggttgataaggggtagcgaattttccaagattgacgactatccaattcaactgcgcaatcatcaatagaaataataaaatcaatcatcgtagtcacctcatctatagtgtactactttgattgattttgtcattatgaatctagttttctgaaaacaaaagtttcttcatgcgtttggcgtgtaaactcaactcttttaaatctattattgtaaattattattttccataatagcatcaataaagccataatcaagtgtttcttgagcactcatccaacgatcacgctctgcatcatcatggactttttcaatagattgaccagaattatcagctaagattttttctaaagtatgacgcgtttttaaaagatgctcagcagcgatagccatatcagattgctgtgtacctccgcctgttccgcccattggttggtggatcatatattctgcattcggtaacataaaacgttttcctttagcaccacttgaagcaataatggttcccatcgaagcagccatccccataacaatcgtctgtacgtccgatttaatgaagttcatggtgtccacaatagcaagtccagccgatactgaaccacctggtgtattgacataaaggtaaatatcctttgtattatcttgtgcatcgagaaacaataactgtgcaatgatactattggccatattatcctcaacttggcctgtcaacataataatacgatcttttaaaagacgtgagtaaatatcataagaacgttcaccacgacttgtttgttcaataactactggaatcatatctttctccatttctttttatcactgtcactattataatcatttggtcaacaaaggtcaaataataacttttttaagaaaaggctttctgagttcttcagaaaagccttattcatctcaaatcttattttgtaccaaataagcgatccccagcatctccgagtccaggaacaatgtagccatgttcgttgagtttttcatccaaagcagcggtataaatatctacatctggatgtgcttcttgaagtgctgccactccttctggagctgctactaaacaaacgaatttgatactagctgcgccacgtttttttagagaatctactgctaaaatagcagacccacctgtagcaagcattggatcaactacaaaaatctgacgttgatcaatatcttcaggtaacttaactaaatattcgactggttggaaagtctcttcatcacgatacataccgatatgaccaactttagcagctggcacaaggcttaagaaaccatcaaccataccaatacctgcacgtaaaattggaacaattgctaactttttcccagctaattgtttttgtacagttgtcgctactggtgtttggatttcaacatcttctaaaggcaaatcacgagacacttcatagcccattaacatcgcaatctcatcaactaactcacgaaaatctttagtagatgttgtagtgcgacgtaagattgacagtttatgttgaataagtggatgtgaaatgacttgaaattttcccattataatgaccgctttctatttaattttgagcattaaaaacattctaatgcttgtttacattcaaagtattataacataaaaaccctttccatgcgactttttttatagtctagtcattttttctaaagtttgtcactaatcgcaaaactgcctcctcaataacagacctaggagctgcgacattgattctagcatgttttttcccttcttttccaaaagttaaaccatcatttaatattaatttggcatcatatcgaagtttttcttgaatttctaaatgcgttaaattataagcagaaaaatctaaccaaacaagataagttccctctggtttcatcactttgatatgagttttttgcgttaattgctcataaaggtattctattgatccttctaactccatttttagggcctttaaccattgtttctcttttgtaaaggcaacttctgtagctaataaccccaatgaagaaatttcttgttgattgttagctatttgcctcttcttaaaatccgagcgtaacttttcattttcaattattgcaaaactatttttagtccctgcaatattaaacgttttagttgcactagataaaataacactcaattctttaaaactagaatcaacagtattaaagctatggtgtacattatcaaataataccaaatcttgatgtatttcgtcagaaacgaggataacattatatcgtttacagatatctcctattttttgaatttctccttttgtccagacacgcccaccgggattgtgtggactacaaaaaatataaagctttacattattttcaatgatatctttttctaattgtttaaagtcaatctcaaaatactgattattattaagtaaactatttgaaactaaatgacgattattgtattttatagttctagcaaagggcggatagactggggtattaattagaacagcatctccctcctttgtgaaggcttgtatagcaactgaaatcgctggtacaaccccatcaattaataataatgattttttatcaaattgataaccatgttcttgcacttcccaattagagatagcttggtataaactgtctttaggactatcatagccaaaaaccatttggtgtgaaaaatcttcaatagcctccgacatttctggaaagataggaaaatccatatccgcaatccaaaggggaaggatttcttgatctttttgaaccgccttccattttatggtattacttgaaaaacgttctggtaaacttgtgaaatcatatgtaatcataattactcctgactattctacagctaaaaatatcccttgtcgccttggtgactattttaccatttgtttttgatactatatactaattaacattctaaagataaaagtgaccattttaaacgatcactttctttattattttaatttatcattttcataagtatggcttaattctaaattaggaaagctttgctgcctaagggcttcataaacaatcatacaaacagtgtttgaaacattcaagctacgcacatgctcatcgttcatgggaattcgtaaggccttttcggcatgctcgcgcataaaagtttctggcaatcctttatcttcacgaccaaacataaaataatggtcttgatcatcattgtaattttcatctgagtaaaccttgtcagcaaatttgctaattaggtgaactttccctcgacatgacaacataaattcttccaaaccatcatagaaactaacatctagcttatcccagtaatccagtcccgctcgtttcatttttttatcatcaataggaaatcccatcggtcgtatgatgtgcaaaggagcatttgttgccgcacaagttctagcaatattaccagtatttgctggaatctgtggttcaaataaaacaatatgatttcgtccgctatcggaacgatgatttttctgcgttagtgtttcaatattcatctcatcatcactttctagaactcattctgactcgcaaaaaaaccacactgctcggagtcaatctcagcaaacaatgtggtttatggtggtttgttaacttaaatcataacaggtttgatttaaactaacaaatcgttgacactattatagcacttcagtctacaaagtcaacctattcatgagtttttgggttatttttttgatagatataatgacaaatcaaacagaataataagcaaaaacattggaaaattaaaaccgtaaagaaattacttaacaaactcccgataaggaggatcaaaccgcctaaaattgctagaatcggtgaaactaagccggtaaatttatttttaatatcttttttgagataaaggctgagtactaaaacataaagaatgattaaactggtattattaaacaccacagcaatttcactaatatcactacccggcaataagttaaattttgtaaccataaaatgaacaaaaagccaaaaaatagctacagccgtcaccgtcaaactagctggcaatgacatttgatacttcaaatttatgttagccatcctctcacttttgatccatccgcgttccgcaaaagcttgaggtagacgcatcgtcccaagtaaaagtccattggcaacacctaatacagatagaataacaatgaaagataataaacgcccaacactaggaccgaaaataatattagctgcataattaatagcatcattaccggttgtcataataaagctagcacctaaaatttgtgtcaaaccatagaaaaatgccaaatatgataataagataagcgctggaccaatgacaaaggcaagtggtaaattcttcttgggattcttgacttctggtgcaatattaacaaaaattgtccaaccatcatatgcaaaatacaatggtaccagacctgacacccaactccatccaacatttgacggttgaatagctgttaaatgttgtggaagttgtggagctttatcagaccaaaaagcaccaattaaagcaattagaactaaaggaatcatttttacaaaggtcgttaaagattggaatccccctgcaatacgcttagcaaagatattcatgagactaagcgctaaaatataaacagcagctaaaataatctgtgattccaaacttgatgattcacctaaagtataaaatgcagctacccatgaaacgattgctgttaaagttggaagatacaaaaaagacgcaaacaagcctaaagttgctgctaaagctgggctaacatatttttcgtagtaagaaaaaataccaccactttcactcgttctaatagctagctcagaaattgacaaacttccaaaaacaatcgaaaaagaacctagtactaaaattaccatgcctaaaaagacatctccaccagtaaatttaaggatgtcatcaactttaaaataaatgcctgaaccaatcactacacctacaatcatagcaattgtagtcattaatccataggtctgtttaatagaattatgattctccataatatctccatttctactgtacgcttaaaggttaattataacctaatttagggcttgtcacaagtttatctgtgttatttttcaccagattctgataagagaatcatattactcttatcagaaagatgaaaacgttttttaaccataattctcgtgcatttttactaaaaaaaaggtatcatagagtttattattggaggtaaaaatgagaataattgttgtcggcggaggtaaagtcggaaccgcactttgtcgctcacttgttgctgaaaagcacgatgttgttttaattgagaaaaaagaaaacgtccttaaacgtgtcactaaacagcatgatattatgggaattgttgggaatggagcaaactataaaattttagaacaagccgaagtcaaaaattgtgatatttttatcgctatcactgatcgagatgaagttaatatgatttcagcagttcttgccaaaaaaatgggggcaaaagagactgttgttcgcatgcgtaatcctgagtattctaatccttacttcaaagataaaaactttcttggcttctcttcagttgtcaaccctgaattgttagcagcacaatatatcgctaataccatagaatttccaaatgcaacttcagttgaacacttcgccaacgggcgtgtgatgttaatggaatttaaaattttagaaggaaataaactctgtcatacttcaatgagtcaaattcgtaaaaaatttggtaatattgttatttgcgcaattgaacgcgatggcaaattgattattcctgatggcgatgcaactatccaagtcaaagataaaatctttgtaactggaaatcgtattgaaatgatacttttccataattacgttaaaaataaagttgtcaaaaacttgatggttatcggtgcaggacgcatcgcctactacctactcaatatccttaaaaataccaatacacacgtcaaactagttgaactcaaccaagagcaagctgaatattttagtcaagaatttcccaatgttcctgtcgttcatggggatggtactgctaaaaatattttgttagaagaaagcgttacaagttttgacgcagttgctactttgactggtgttgatgaagaaaatatcattacctcaatgttcttagaaagtatcggtatccctaaaaacattaccaaagttaatcgaactagcctactagaaatcattgacgataaacaactatcaagcattatcacacccaagcgtattgccgtagaccatgtgatgcactttgtacgcgggcgtgtaaatgctcaggattccaacctagaagctatgcatcatattgctaacgatcgcattgaaaccttacaatttgaaataaaagaaactagcaaattagcaaatcgtagccttgcatctttaaaattaaagcaaaatattttaattgcagcgattattcgcaataataaaacgattttcccaactggtgaggatgttttaacagtgggtgatcgtatcgttgttatcaccttattaaaaaatattactagaactagtgatatgttagcgaggtaggaatatgaataaaagtatgattcgtttccttctctcaaaacttttgctaattgaagctgctcttctagcgattcctctaactgttggacttatttaccgtgaaccgcaaagtgtcatgatgagtatagtcattaccatgattattttaatcatccttggattactgggttctctctttaaacctaaaaattatcatatctacactaaagaaggcatgttaattgttgcactctgctggatactttggtccttctttggcgcccttccatttgttatttcagggcaaatccctaatattatcgatgctttctttgaagtatcttctggttttacgacaacaggagcaactattcttgatgacgtcagtgtcttatcacccgcgctcttattttggcgtagctttacccatcttatcggtggaatgggggttttagtatttgcccttgccatcatggaaaattctaaaaatagccatttagaggttatgagagctgaagttcctggacctgtatttggtaaagttgtctcgaaacttaaaaaaactgcacaaattttgtatttgttatatcttcttatgtttgcagtatttgcagtaatattatattttgcaggtatgcctttctttgatagtattatcatagcgatgggaactgcaggtacaggtggttttgcagtttacaatgatagcattgctcattataatagtcctctgataactaacttagtttctattggtatgcttatcttcggggttaactttaatctttactatcttcttttactccgaaaaattaaagcattctttggtgatgaggaactaaaaacctatctccgcatcgtggcaatagcaactttcatgattgctctaaacgtcatcggtatgtatgataattttcgacaaggcctcgaacatattttctttgaagtatcagctattattacgacaactggttttggcgtgactgatatcactcgttggcctttgttttcacaggttattttgctattcttgatgtttatcggtggttctgctggctctacagctgggggctttaaagtcatgcgtagcttaatcctagcaaagattgcacgtaaccaagtattgtctacactctatcctaatagagtcatgtcactacacattaataaaagcgttctagataaaaatacacaacatggtgttttaaaatatctaactatctatttagctatcttcatggcactcgttcttgttttaacgcttgatactaatgattttttggttgttatcagtgctgcagcctcatgttttaacaacataggcccactcttaggtagcaatgaaactttctcattctttagtccattctcaaaactccttctttcatttgctatgatagcaggacgtttagaaatataccctgttttattgatgtttattcctaaaacatggtcaaaactataattacaaataataaaacggatatatcaatctgatatatccgttttattacgtcttaagctaaaatgatcagggacaggatcatttcctccgtgggctaagggatgacatcgcaaaatacgtgcaatccccatcaacacaccttttagaccatgtttttgaatagcttctatcatatacgtagagcaagttggacgataacgacagctagctgggaaagctggagaaatatttttttggtaaaagcgaactaagaaaatcaaaaaagatttaagcattaagatttattaatagccgcattatgcaactgactaatttcttttttatttaatcgtcgtgcttccccaggacggagacccgttaaatctaaggtaccgaattgtgtacgagatagcttgtccactaataacccaacttgttcaaacattttcttaacttgatgattacgaccttcatgaatagttaattcaactactgaacgatttttttcatgatccacttttatgatagtatagcgagcaggttttgttttcttaccatcgataacaacgccacgcgttaatggtcgaaggttttctttagtagctattcctttaacacgtgctaaataaactttatcaatttcattacgaggatgaatcattttatcagtaaaatcaccatcattagtcaaaattaaaagtccagttgtatcccaatccaagcgaccaacaggatatatccgttctttgacttgtggcaacaagtcaataactgtcttacgtcctttatcatctgagacacttgaaataacaccacgtggtttatttaagagataatataccttctcttcgttgtaaattggacttccttcaatttcaaccagatcaccagcctttacttgggtcgccaattcattaaccacttgaccattaatcgtgaccattccttgcttgattaattcctcagcttttctacgacttgcaatccctgcatgcgcaatatatttattaattctcattgttttccttatcttctgtattaattgaatccattgaaaataacgatacttcttcgtcaactaattcaattgaagaggcgtcaattaagtcatctaactgattaattcccatataatctaagaaataattagttgtctcataaaggttaggacgtcccaacacttctttctttccagcctctttaattaaaccaaaagctatcagtctcgttatagctccactggaattcacgccacgaatatcatcaatttcaatcctagtaataggttgtttataagcaataatagatagaacttccaaacttgcccgagatagactctgattaatcggagccttcgcataatctctcaacaaagtcatataactatcctttgttaccaatttataagtttgtgctgtctcaagcaataatagactagaatcgtcatcttcttcatatcgtttagccaacttttctagttgctgtattaatgctgatggtgtcaaagacaataattctgccatttgacgcaaactcagtccatcttcacctgcaacaaaaagaagagcttctattgagcctaaataagtcatttctcttcctttcttaagataacttgactaaaattactgtcttgttctactgtgatttgatgtaattttatcaactctaacattgccaaaaataaagttatcatttcagattttgtttggcaatccgcaaacacttcttgtaatgtcgttttctttttaagattaaaatgtctttcaataacgatcatcatatcttcaatacggtagtcttctttctcaattaccgtttgactatttgacaattctttttgtttttgggacatcatttgagaaaaagtcaaaaaaagatccatcaccgatttatcgtgtagaagaattgcatcttcaaagataacttcttgttttggttttgaaaaatatttggcgcgttcctgatgctgattagctaactcttcacttagcactttaaaacgtctatattcctctaattggctcaacaattccatttctggatcatcttcaataggatttgactccactactttaggtaataagttacggctttttatcaacatcagctgacttgccataagcatatactcaccagctacttctagacgcatcgcctgtaatgttgctatataagcaaggtactgctcaataacttccacaatcggtacatcgtatatatcaacctcatatttagatacgaggtgcaagagtaagtctaggggcccctcgaaatcttttaacttaatatccattatctataatatctctctaaagtgataggagtttttaagcctagaaggcgactgagctccgtcatcgttttgccattttctttttgctttagaataaattgttctcgcagaagttgtgcagttagttgttgctcattcttctcatttaagaaatctgttaattgattaaaaaaccattgtctagaataaggcttaccgttatgctcaaagactaagtcaccatcttcctctaaagattccaaaagaaaaggaagcaagtcttctggaagttttaaaatacgcttcatctgcgatttttcaatacttaagatattaaaagttgtatcaaaatcagccttcttcaaattagcaatttcagccggagttaaacctaaagataaaatcaacaaagcaatcaaacgaccactcggataatcagtatcttgatagaaatttgataaatccattatttgagactttgtctgagccaaagtgattttttcagtctcttgtagtctgtaaaattccttcagcgttcctctattatataaaaagaaaagaaattgattgactgcagataactttcgcttacgagctgttaacttaaattcacttagagactgttgatacaatgccagtttttcagaatttacatgtccaccaattattttataaaattgctttaaatcatagtgataggacttacgcgaattgagagataatttcttactctcaataaaattattaatatcatttatcattgtttttaggagtgatagtatattcgtctgtaaaatcatgtaggaggctattaatagcttttaaaatcgatttacgggttataatgcctctaaaatcattttgatcactgataacaggtaaaaatggataatctacaatcttatgcataattgctgtcagagtagctgcctcattaatcggctcgatttttgtattaaccatctcaacaatatcagtctgtgccatctcccaatctgttaattgacctttagattggtagcccataatgtctgagatactaatagtacctacatattttttctctttagtgataactggtacacgtgaaaaaccattacttgctaatagtaacataacgtggtctgcattgtgtgtatccacaaaaatagcaacgtcttcagctggaattagatagtggtccaaatgatttagcaaaaacgactcaaattctttagcaatcatcttgataattcctttgtcaagttaggatagggttggtgttggcgagtataatactctaccaaaaccttactatctgttatagttacaacagcgtaaagcttctcatttattggtcctcttggctgcaaaacactacctggattgataaaaatagttttaccatttttccaagcatctgcacgatgaagatgaccatataaacaaatatccgcgtcttcttgctgagctaataaatccaatttatcccaggtaaaattaatctgatggagatgaccatgggtttgaacaataacagcattatctatttttgtaaccaaaacttccggataacctgaatcataatcacaatttcctgtgaccacatgaatgccttcccatataggatctgagctaggaagttcggaatccccattgtgaaaaatagcatccacttttcccaaataatgattctttatatcttttacaatgtcacgatctccgtgagaatcactcattacaactaattttctaattgccattttggaaatacctccatcaatttacggacagcttgcccacgatgtgatagattatttttttcttgtgcgctcaattcagctgctgtcctactaccttctccgacaataaagagcggatcataaccaaagccattttcccccttaggttccgtaccaatataacctggccactctgcttcaactaccaaactttctttatttggagctgacacgactaaggttgtatgaaactgtgctgaacgtctttctttgtcaaataccatggctaattcatgcaataatttggcattattacgagcatctgtcgcgtcaggacctgaaaaacgagcagaccatacccctggcaaaccacctaaagcatctacttttaatccggaatcatctgaaattaccatttttccagttaattttgaaatagtctctgctttaagtcgagcattttcttcaaaggtcataccagtctcttcaacttctggtaaatctgggtaatcatttaaattttcaactttgagtcctaatttcccaaataattctctaaattccttcgtttttccttcattgtgagtcgcaattaatatggtatccccaaaattattatcattctttaaatcaaagaatttttctaaagaagtgccctctttaggtaagtgaactaagaacaactgatcatcttcactaactaagatggcccctttatgttgagtcactttgatatgccttgaatactcttgattaatcatatcaacgaggaatgctaataattgaaaatccgaagtcatctgcacaacgtgaagctgtagaccttcaactttcaaagttgataatagacgatgaaaaacatcttggatagcttcgtaagattcatcattaccaaaacaagtaaaataattaaaagcttggaaactacctaaaaaccaattgccttcagttttactttcaaaaattgtttttgtcataatacgatacgctccacatttatttcttgactaagccattgttctgcaatttctttaaaaccttttgggctggcggttgtgtaaaagtgatgaccaccgtgtttattttgccaattatggtttatctcaaaatagttcaataaaacagaaatatcacgaacggtttctgcgccactatcaattaatttaacctcagcccccataacattttgaatgatgggacgtaataggggataatgcgtgcaacctaaaattaaagtatctaatttaccaactaatggggacaacgtttcataaaccacctttttggctaaactagaagacatctgatttgattccacaattggaacaaatttcggacaagcaagggataccacagcagtatttggagacaaagcttgaattttttgacgataagcatctgatttaacagtcatgggagtacctataataccaactttccctaaattagttgatttgatagctgcgctagctcctggtaaaataacgcctaaaacagggatgtctagtttttctttaatttcttgccaggcaactgcagttgctgtattacaagctataacaatcatcttaacatttttagtcaataagaagttaaccatctgccaggtaaactctctaatctgttgagcaggtctaggaccatacggagctctagcctgatctccaatgaagattacttcctcttctggaagttgacggaacatttccttaacaaccgttaaaccacctacaccagaatctagaaagccaataggcctactatccatttttattcctccaatattagtgactaaaagaggctggacaacagtcctagcctctctatacaataaccaatcagtcaaatctacacttgaccaagtttgcccaaatcttgtctagaaatctgatggactatcactcactatttcatcactaaacgcttcaatgctaaaacactcttattttttagttttgatagctgtttttgcgtgttttacaatattacggtatgtttgttgaactttagcttcactaggtttttgtcccatttgactcatcatttcacgaatagcatccggtgttaaacgagggtgctctccaatctctttttcaatttgtttacgagcaataaaaatgcctcccacgagaccaccaaacaaagcgacgataattaataaaatccaaatagttattgacatctattcattctcctcatttatttacatgactcattatagcaaaaaaagaaagagtttacaaatatatgtaaacaaaatcaaagcctctatcgtccttgtcacgtcaatacactattaaattttcactagagcatggttaagcacatagtcgagtcctttatcttatcctaagtgttttccccaacttttgtgtcatccatttccaaatgaagagagctatgtaaaaatctaccaatccatgtagcaaagagcctagtcctatcaaagaaaatagtgaccataaataagttgaactactgttagaagtcattgtgattatataaacagtaataaattcgagcagaccatgaattatgttaatagctacagcaaataacaatgtttgccatttactcatcaataaagagggctttgacttaatcaagaaagccgcaattaatgcaaatccgatatgtgataaagctctaagaacgattacaatcggaaaaccagctagtagaaatccaagtcctgtccctaaagctaccaatattgcaactggaacagatataaaaatacttaaaaataaaggtacatggcttgctaaggtgaaagaagcaggcccaataattattttagcaggcatgattataggaatcatgattgcaaaagctactaaaatagaagtataagaaaccatttgtgttgttttttttgacatttttatctcctttgaagctattatacaaaacaaccttacaggtgtaaagacacctgtaaggttatttgtctatgtataaaattcctgctttttttagagcctcacatatttggtcaaaaactgactgatcttgacaagaaatcatatgtgtatgtagaccatctgtcaaagaggatagcaattctgcattggaaacttttaatttagcagtaaaattatcaatgtctttttggctttgaatgtttaagggagcagtcagcatcccataaatagggtgctctacctccacattcataatgattccttgataccgcaaaataatttccagttcttcttctgtctgttctatgccatgctgacaaaccaatctagctgtgaattgatgagtacttagagcactggacataaggtatccttttggggtagaaataatatcacattgttgtgcacgcaataaggcaatatctccaacaatcacctgcctactaacactaaaaatctttgctaatgtgcttgccgatatagcttcttttgttccttttaaagtcgttaaaatattttctcgacgctcctgtgccttcatataacaaattccttctttggtgttatttcacaattaaaaactggctagaatatctaaccagttagcctcaatcatttcgtgcaaaaagacgaagaatatttaagaatagattaataaaatcaagataaaggcttagtgccatcgaaactgcccaaccatctgcgacttggccgccttggctattgtagacatatttaatcatttggttatcgtaagcaatcaatccagaaaagatgatgacacatacgatactaatgatataactcatacccccactaccgataaataaattaacaagacttgcaattaaaatcccaattaaagcagccattaacgctttacgcatacctgataaatcttttttagtcttagctccaatcaaagccattgcaaagaaaacagccgcagatgttataaaagcttgaagaactgtagtttgcgtgtaccttgcgataatgaaacttaaagtaaacccattcaaagctgaataaatcaaaaataatggtaatgcagctggtgtgtttcgacgcgccgctccactagcaacaaagactaaaaccaattctaagatgattgctccaaaatacaaccctggcattttttgcatgatggcaatcatattttgtggaaacatatacagcataatcgcagaaacagcagctgacaaacctactcctatccctacaagaccgtaaatcttagcaaaaaattgattcagccctgaatcagattgtgtgtaaatgacgttatcattcatatgtattttcctattctaaattttaatgattatgactacctaagaatttgcgactaaaacggataggtttcttaaaaatacgtttgagtggacgagaagcctctcgtactgcccaatacttatcaaccatagtcacaatataactttctttataacgtggcggtgcaatagtcgctccccacatgtgcttcaaaataatatcttcttctctagcgtttaaatcagttaattttcgcgcattacgaaccgctatccttggatgaacccaggcatggctcttgttaaatttcgttacacgccaatcataataaaagaaatcatgtagtaaaccacctcgagcagtactactcgcatcccaaccaaacttcttagcaattttataacttgtataactaacatttatagaatgctctaagcgagttgagtgatgatgttggacaatagcttcgagtttttggaaacgtggatggtcaataaggtgaccgaccaaatccatgaagtccttatcgtcttgatactttttcattataatcacccctctggggatattataacatatgaacttaaattaagctgaaaatgactactcccgcagctactgctacattaagactttctgcttgtccaggcatttcaatatgtgctaaaacatctgcttcttctgtcatagttttggaaattccctgtccctcatttcccatgattaaagcaaaataatcatatttagggagattcttataatttaccgattgttcagataaagttgtcgcaatcatagttatcccttctgctttacaaaagttaacaaactgctctatttctaccctaaatactggtaaatgaaagtgactgccttgcatagaacgaagtgttttttggttatacaaatcagcagatttctgagataaaaaaacagcatcaaaattcgctgcatctgcagttcgaaccattgttcctaggtttcctggatcctgcacatcttctaatacaagaaaacgtccttttttaatatctgtccatcttgtctcttgaaaggcaatctcagctacaatcccttgaggagtctgtgagtcagttaattctttcaaaacatcatctgtaacaacaatagctctctcgggttttctcaaacgatctattgccgtttctgtcacaaaaatatttaaaaattgtgcaccatatttttcagcttcctcaaataaatgccagccttcaataagatatgaagatttccgatattttttttgtaacaactttttcgtttttttaatgagattatttgattttgaagttataatagtagtcataaacctattatatcagaaaagaggtcaagttatgaaaaaagttcatttaattgtctcagggcgcgttcaaggagtcggatttcgctatgcaacttattccttagctttagaaataggtgatatttacggtcgcgtttggaataacgatgatggaactgttgaaattttagcacaatctacagattcaaataaaatgacacaatttattcagaaaattcgaaaaggaccttcaaaatggtctaaagtaacttatgttgatattaaactagataacttcgatgattttaatgactttaaaatgagtaattaaaaatcattctgcggaagtattgtttaattcttaaaaaaaaagtaaaatagataggtatattaaaaattagaggaactaaaaacattgaaaaaaacattgaaacgtatcttattctctagcttatctttgtctatgttattattattgacaggatgtgttagcgttgataaggctggaaaaccctatggagttatctggaatactcttggagtgcctatggccaacctcattacttatttcgctcaacaccaagggcttggttttggtgtcgctatcattattgtaaccgtcatcgtacgtgtcgttatcttaccacttggactttatcagtcttggaaagctagctatcaagctgaaaaaatggcatactttaagcctttatttgaacctattaatgaacgactacgcaatgctaaaacacaagaagaaaaattagcagctcagacagaattaatgacagctcaacgtgagaatggccttagcatgtttggcggtattggctgcttgccattactcattcagatgccatttttctcagctattttctttgctgcacgctatactcctggagtctctagtgcaaccttcttgggacttaacttaggtcaaaagagtctgacacttactgtcattatcgccattctttattttgtacaatcttggttgtcaatgcaaggtgttccagatgaacaacgtcagcaaatgaaaacaatgatgtatctgatgccaataatgatggtattcatgtctattagtttacctgctagtgttgcgctttattggtttattggtggtattttcagtattatccagcagctagttacgacttatgtacttaagcctaaactacgccgaaaagtagaagaagaatatactaaaaatcctcctaaagcctacaaagctaataacgcacgaaaagatgttacaaattcaactaaagccactgaatctaatcaagcaattattacatctaaaaaaacaaatcgtaacgccggaaaacaaaaaagacggggataaaacaagcatactaaataatggtgtgttgtcctaaacagttaaagattattatgtaattcaagtaaaaaagacttagttctatgtcctacatagctaagtctttttagttttgcctaacttttcatataaaaagcaccctaaaagtcagataaaaatctagcttttaaagtgcaagtaatctagctaacagactaccttattaataaagtaatcgtttttcccaccagtcttgaataattgcataaagcgtacaaattacccaatagataagggctactaagatataggcggtcatatagtcggagtaggttcccccaactattttagcattattaaagatatcaggtaccgtaatcatcgcagtcaatgaggaactcttgaccatatctagcaaaacattacttaaagaagggagtgcaattcttgttgcttgcggaataataatgcctctataaatcgtcggtgtttttaaccctaaagctctagcagcttcccactgaccatgatcaacagctaaaagagctgctctgataatttctgatatatatgcactagacatcatggtaaaacctacgatagaagcagtcacagcatctaactgtatccctataaaaggcaaaccaaagtagataagaaagagtagaaccattaaaggaatcccacgcattaaggaaatatgaatattagctagatacctcagtaagcggaaatgagacatcttcattagagctacaaagaatcctacgatagctcctaaaataaagccaaccaaggataatccaatggtatatggtaacccctgaataacacttggaaaagccttaacagctagttccaaattaaaaatggcatcccagtttatcacttatctactcctctcgaaattttttatttaactttaattactggaattttatccgttccagcaggttcttttgtgagatcttgaccagcataatatttttcagagatttttttcaaagaaccgtctttcttcatatccttgatagctgcatcaatttttgttttgaggctcttatcttttttactcatcacaataccttgctcagtcggattatacttcacatcacccatttttactttgatatctggatattgttttgttacatattttacagcaatgacttgtgtgtagtaatcattcggaatgaaatctgtacgtccagttgatacatctcgaaggtaaacgtcattagttacattgtcataaataacaggttcagcaccttgctgttttgcaattttcatatattgcgttccagcgccaccaccagcttttttacctttccagtcagataaatcttttgctgtaatctttgaagaaccatctgcacgtacaatcatacctccaacagaatatttataaggttgagagaaattgtattttttcaaacgctcgggagttgtgtcaaagttattgacagcaacatccaccttaccactatctacagaagtaaatgattcagcaactccaacttcaacaaacttaacttttatcttaagttttttagcaatcgctttcatcatatcaatctcataaccagtcaattttttatggtcatcataataacttgttggataaagcgttgcaggggtagcaaccttaaggacaccatcttttttaatattgtcccatgttgtttctttgctagattgaccatttgagcaagctgctaatgtcattgcagataaaccgactaaaccaagtaaaattgtctttttcataagtactcctgtagattaaattatattaaaatggtttggcgtactctatcgaaaattaaatttaatgaaaattaatacataaatttacgataataatacaaccattgttaagagtaccatattgtatccgttttcgcaaaaatattgtttacttttcaaattaatggtaaacaggccctttgaattgcttctctttttcaaacaactctgcaacagcaagcaataaatcttctctccctttagccgctgtcaattgtacacctaaaggtagcccctctttagttagatgagttggtatggctaaagaaggttgccctgtcaagtttggctgatgtgtaaaaggtgtccaggccattgagtcttcaaacattttccaaattaaatcctgttgttcacttactgagaattctcccatatgcctcaattgtttctggagtgtctcgtctaaatcaaattgtccatgaaaaggagctggttgattagttgctgctgttaaaattaaatcataattttcatgaaacctcgccatggtagctgcaaattgatcccatgaatctaagagtttactgtaatctttagccaataccctttgtccactctgatacatagcccaggtcattaattccatatcgctaaattccattgaacgccctaaactcttttcgatgtcatcaaacattgctgctgtttcaacgctattcatcatacaataagttttcatagaatgaataccatctaaaggttgttctactaattctaaatgattccctttttgagacagaaaatctgcggcttctttaatagctgctttagcctcacttgatacctttgtttttaagggagaatccatcaatactgctatttttaggggtttactaacgctaaactcgaaaagactctctttgctgagttttttcaggggaaatgggctttctacttgatatgattgtaaataatataatagtcgttttgtatctctaactgactttgttaaagcaaaatgactagaagccccttgccaacctctataggatgaaggtccaacaggtatacgtcctcgactcggttttaaaccaatcaaaccattaaaacttgctggaattctgattgaccctcctccatcactagctcctgcaattggaaccattcctgaactaacagctgcggctgcaccaccactagagcctccagcatttcttgaatggtcaaatggaagattaacattcccgtgaagttgaccatcactaatattcttaaaaccaaattcaggggtatttgttcttcctaaaataataaaccctaatttttcaaaggactgcactaaatagtccgtttgtttagcatgatagtgtttaaataattgtgaacctgaggttgagagttgtcctttttgattctgtcccaaatctttcagaagaataggaactcctgcaaaaggagcatttgattcatttgcgtatttggctgcttgacgcgcctcattatattgcttgctgacaacagcattaacgcttacattctgttcctcgatcttgtagattgcttgctctactaattcttgcgacgaaatcttatgctgttttatcgcttgtaccatagcggtagcatctttaaaaaccatataaacacctcataaaatgtatttttattataagataacaaaaaatacttaaaaaaatagaataacgtctagactctagatattattctatgatttatactattaatttgttttttcaacactaatgatttcaacttgatagctaccagcaggtgattcaattgtagctaagtctcctgtttttttaccaattaaagcatgagcaattgggctttcattcgaaatttttcctgaaaaaatgtcagctccagcagcaccaacgatatggtaagtatctttatcatttgtaccaacttcttggacaaggacagttttaccaattgcaacctcatctttagcaactgcatcactatcaataatttcagcataacgaatttttgtttctaaaatttgaatttgaccctcaacaaatgcttgttcgtcttttgctgcatcatattcgctattttctgataagtcaccataagaacgagcaatcttgatacgctctacaacttctggtctacgaactaattttaactcttcaagttctttttcaagttgatctttttccacttgtgtcattgggtaagttttttctgccattttatttctcttttcttttcattttttcaagtcaaagatataaacatgatgactcgcaccatgtttataagcttagttaatttgactattgatatatttttcaacgttagccttgtgtgtttcaaaatctttagcgtagtatacatttccggtcttcacatcagcgacaaaataaaggtaatctgttgaagcaggttttatagtcgcttcaattgctgagatacttggactatcaactggtccaggcatcaaaccagtattagtatagatgttgtatggtgatttaattgaagtattaatttgagcatcttcagctaaacttgttttatcacctaatttccccatagcatacaaaattgcaatgttactttgaagagcttgaccggctgataatcggttataaaagacacttgctattttacggcgatcttcgtctgttgatccctctttttcaacaagagatgataatgtcaaaacatcatttacagacatattcttcgctttaatagtgttatagtaaggtgccatcttagtattcattgttgaaatcatatcttcaacaagtccttctaaggttgtatctttataatagttgtaggtagctgggaataaatatccttccaattgataaatagcttttgatttatcaggtaaacttcctagtaaatttggatatttagctaccatttttttaataaacgtttcatcttgaacaagtttcaagaaatcatcagctttataaggtgtacttgtagtctttgtatcaattttattagactcaatagctttagcaatctgtttaatagtgtaaccctcggtaattaatatcttacctaaagctggttttgtcggttctgcagttccgcctttttccaattcagcagcaatctgatctaaagtcatactttttttaagattgtagtatccactttgaaaattactatagtttttgaacttggaatagtaattaaagactgtggcgctcttaatgactcctgctttttctaaaatttgaccaattaatttattcccagatcctatcggaatttcaacttgtacaaatttatttgaattggaatcaacaggtttaatagcactatctacaaaacgataacctacaaatgctgtcaagagcaatacaagtatgataattgatatcagaatacgtgcaattcgttttgccacattatctgctttctgacgtctttcacgcttgttatgtttgttcttggctgacaaagctataccctcttcttcttttgacaaatcctctactcggataggttcctttgctacgggctctaactctgatatctcaccaagttttacattttcaccttctgtaggaatatctgttgctctcacaagaaagatttcttccgtttcttgattaggcacagcagttgcaacatcagtcttatctgcttttaaatctatgtcaggtacattttcagttgtcctaaattcactagatttggagccgctatcaagctctcttgaaggttccatcccttgattgataacttgttcttcttgggaagctaatgcttgttccgcctgacgtctttcttcttctcgagcagcttctgccagaagtttcgcctcaatccgagccttctcttgctcttctaagcgttgcttagtctctagcgcctttgctctagcttctcgttcgtctttcaaacgttgcgcttcataatctgccatcaattgtgctgttctgcgagcagcttctttggcttcttgctctttttgatagagttcttcttcacgcaactttctcaaacggttagcttcttctaactctgccagaatttgttctttaaaacttttctgatcatggttagaatgctgatcgtcattaaattcggtcaaagagatttcctcctaataataatcacaggcaattatatcttaaatagtctataaaatcaacaaaactttgacaatgttatctacttttaacaaattgatcgtgttggattattccaaatcatattataccaaagcgaaccaccatgtttggagtcagattctccctcatctttaaatccattcatttcatagaaggaaattaaatcatcatggcaagttaaacttataccatctcgttcttgagaaacaaccaggtctttcatcgctgctaataatgctgtaccaatcccctgacctttaaaatcaggatgtattgatagactagtaattcctatgaaaccacctacccttacagggaattcagaaactttatggaataaatcgtccgttaagtaccgacctttaataaccggtccttcaatgtaacctgctaaacgaccattaatctctgcaactaaaaaagtatcagtcattatcgttaaacgttcttgcattgcttttttactcgcagcctctgcttctgaaaaatttatttgttcaatactaatgacttgctgtaaatcctctaggcaaccatttctaataatcatactcatctccttaatttctttatgaaattctcttgataaagtcagatagaggactgagaaacttctctcagcccttaccatcaacttattgtgtatttttagttaggttagctaataattcttcaaaagagcgctcatacaattgaatgtctccagcacccataaagacatagacagcattatcatgattgagtaaaggcgagacattttcgactgtcactaaatctgagtgtttgacaatcttagcagctaaatcttctaccttcacctcaccattatctacttctctagcagaaccatatatttgagcgagataaacgctatccgcttgactcaaggcatgggcaaattcgtctaaaagagctatcgtacgagtgaacgtatgcggttggaaaatagctacaatttcttttgacgggtatttttgtcgagcagcatctaatgtcgcaataatctcagtaggatggtgagcaaagtcatcaataatgacagtatcgtcaataatcttctcagtaaaacgacgctttacccctgaaaacgtcttcaaatgctcagctactaatgccatatcaattcccattatgtaaaggttagcaataacagcagttgcatttaagatattatgtttaccgtatgctggtacatgaaactgaccaatttcttcttggttatagaaaaccttaaagtcagaaccattaacagttcgagtgatgtcttttgctataaaatcatttgaatcttcaaaaccataataatatattggtgcctcagaagtgatttcatgaagttttggatcttctccataaatgaataaacctttttgaacttgcttagcatagtcattaaaggcattgaatacgtcctctaagcctgtaaaataatcaggatggtcaaaatcaatattggtaataattgagtattctggatggtacggcataaaatgacgttcgtattcatcagcttcaaacacaaagtaattagcattagcagaaccacgtcctgtaccatctccaattaggaaagaagtgtctgtaatattttttaaaacatgagctaataaacctgtcgttgaggtttttccatgtgccccagctacacctagactagtgaactgacgcataaaatctccgagaaattcatgatatcgtttaaattgatagcccttttcaataacataagccaactcttcattgttatctggacgaaaagcatttcctgcaataatctctaaatcctcactgatattattcggtgagaaaggtaatatagttacacctgcttgctctaaaccacgttgggtaaaataatatttgtcaacgtcacttccttggacgttatgtcccatttgatgaagcatcagtgctagggcactcattccggatcctttaataccaataaaatgataagtttttgacatggtctctccttaattaatgtctttaaaacgtgtcagatttaattcttgagccttggctctttctttatgaaactgattgtcttgtttattgtaaacttgactgcgtttcaaaaaatcaaaattatttttctttgtttttgggttcggtgtattatcaggttcttgaaatatgattggaatttctgctaatatatagctttcctgctgtaaacgatcagaaagatgacttagttcagtcacctttcgctgagtttgttttttcggtactgttgccttcaattgttgctgaaaagcttcctttgatggcgccttaaattcctgtttcgcatagtaagcttgtcgtttctcccgaacagacctctttgcctcttgtcgagatttgctcaactctgtcgctttttttacaaaactctgcggtggtacaggatcattttcaattaccttaggatgtgatatttcttcatgttcataattgcttttgaccatgctttgatatgttttttcttgataaaagtctcgaatgttgttaattaaatcttcattatcataaagattcatctttacaagcggagacattactggttcatcatctgctatcaacggaaatcgtctagagcctctattcacattatcacttcctttctacaacagacctattataaactaatttttctgttttttcaaagttttcaactaagtaaagcttatcagattggtatttttcattcatttatataaaaaagaaagcgagagaccactttcttttttatattatagtcacatcatcatatttatttagaaactccaagtatctctcgaatatcatctacgctcatgctagcatgggtttcatttccatccagaactgttgtaaccaaatgttttttagtttcttgcatttctagaattttttcttcgattgtgcctctagtaatcaagcgataaacctcgacattctctttttgccccaacctatgtgcgcgactaatcgcctgcatttcaacagctggattccaccacaagtcaatcagaacaacggtatcagctcctgtaaggttgagaccaacgccaccagcttttaaagaaatcaagaaagcatcttttgatcctgcattaaatgctctggtcatttcatgacgttcatttgctggtgtagaaccagtaattttataagttgtaagccccatagctaccatctcacgttctgcgatatctaacatacccctgaactgagaaaaaatcagagcacgatgtccattttccttaatttgtgttaaaagttgacgtaggctttctaacttaccgctttcaccatcataatccataaaaagacgtggagtgtcacaaatttgacgtaatcgtgtgatgccagataaaatttcaattttacgacgatttaagtcagcgtcactagaatgttggatactttcttgaatttggcgtaattgcgccaaatagataactttttgactgtctgtcatttcatttggatagttcatttcaatcaaatccggtaattctgggagaacttcttcttttcgacgtctcatcacaaatggtttgatataacgagcaacttgtttagggttcaacttcaaaaactctttcttaccaggtaataaaccaggtaaaatgatctggaaaatggaccaaatttctaacagtttattctcaataggtgttcccgataatgcaaaacagtttttgacctcaaaagatctcaagctatgggctattttagtttgagcatttttcataacctgtgcttcatccaaaattaaataatcataatttccttcagaataagtctcaaaatcctgcctaaatgatgaataacttgtaatgattacttgatgacgttcagcaataatttcatctctacgaatcttagaaccataggcaactgctacatctacgtctggcgcaaatttgtggaattcatcttgccaattataaattaaacttgatggtgataaaataagcacacgagaatctctagttagttttgtacttaaaaatgaaatcgtttgaagtgtttttccaagccccatatcatcagctaaaatccctgcaaagccataatgatctaacatacttaaccaacggacacctgtaagctgataatcgcgcaaggaagctgaaacagatagaccaggtattttaaacttttctgggtgtctcaaatcttcaatcaattggtaaaaatgttgtgaaaagctaacattatcttgatttgcaaacagttctgataattgaaatgctgcaatattatctaattcaatatgcccattctttgctcgtctagctctcaacccttgcaaagttgcacttactttcttagtttcttcatcaaaaataactaattgccctgatttattcacaaaataaggattattgtcaaacaaagctaccagagcttgatcaacatcgttttccagtaaatcagagaaatcaaaagaaatatctagcaggcttcccttagcttcaatatcaatttgcggtcgttctatgagacgataactttccaattttgcggataagctcactgttcccatttttttaaattgtggaagcatataggtataaaaatcgtataattcttgtgcactgtatgctggatggctggttgaaaagtggggtgcaaagccatatttttctaagagtttaaatactttttcttcatgtttgaagtgactagcaaatgttaactgttctagttcttgacgattatgaacagttaaatcattaccataatcaaataccatttgcaataaaatttcattttgactattaatatcgaactcaaaatttaccttaaaatcatgaatagagaagctccgtggagcatccactagtccaatctccttaaaatccagtaaatgagctgctaacttatcttgatcatctaaatcaaaatggatatgttttgctaaatctccctcaatgggaagactacgaatagccgttaccatcttttcttgcttcaaattaagatggtagaaagtatcgcgataaaacaaataagaattcgcaaatagtggttttaagtctttctctttgatttctaattcaattgattgcctatggacaataaccttaaattgataaagatgatcctcaccttctaattccttaaagtagaggtgattaaattgatgaaaatcactttcaaatgaaaaattttctaaagcattcatcaaagtaacaccctcttcaaaaaaaccacgagtgagactaaggtgacgaccttgatttggtaaaataaactctagatcaattttgcttgaatgacttggaatgagcctccataaaaattctatcaattcttgactggtctcatcaaactgtattaaagacaaagtttcaaagtattgttttccaatctgataataagcttcttttcgaacagtatttaaaaaggctttgatgtcacgaataacataacttctatcatcaggcagtcgtctaatttttaaagtccaccagatatcattagcataaggattttgttctccttgagccgataattgatattttatagtatcatcttcattaataattagactatctaaaaaaacactaccaaaagaggttttcttcttagtttcttgttgactttcttgttgaacttgaactttagataagattgctttaccttctggatcgtttttcaagaaatgctccagagcagctaaatgttgacaatagccttttcttgcaaaaaaatcacaagaacattttgtttcttctgttactaatgaatattcaatctgacaatccccaactttagcttttaatagattaccttcttgagaaatcaaggacaccaaaccttgttcgtagagttctataccttgatttcgaatacgtcctggaatcattctactcattatgctaccaccttcatcttatcccttaattataacaaaattcaagtccaatttcttgtaaaaatactaaattgacacgccgtacgcatgaaaactttctcttcatccttttgtgcccggacatcaattttgaaaagattcctttttaaatcaatgatctgcttagcctctttctccaaataattggactaaataatcttccaaatggacagaaatataccgttgtttgcgacgataactgaggtcttttttaggaaataccatcactttgagaaaatataagcacatttttcggataagatttaggttaaatgcggctcttttatccaatgtctgatgatgatcttcatgataaacaacgtccaataaccagtgcatactctctatctgccaatgacctcgtacacaattggcaaatgtgaggacatccggcttaaagctaaagataaaataacgattctcttgactcagctgaccatccttatcaatcgtgttacgagtcatcccaataccacgtaacttatgccatttgggatggttttgacacaaccatttgatatcggaagacacccagtattctctaacttcaatctgtcccctagatttttcaacagtctgataatactgcgcattttcttggagttcttccaataagttgacatcactaaaataaagagcaatatcatcataaagtgtttcttgatttcctttgacggctaagcaatagtctgctttaccttttataatcgtatcaacgatagccgtctgcgtgcccattgcgtctatcgttacaatgcttttacggatatcaattgtccgcaataactgaggaatggcaacaatttcattacttttctcctcaaccgctacctgtcccaaactaagatgatgacccccatcataagccgttacaatatgaacaggcttctgatttttacctcgattgcctcgaatcgttttaccgtccactgaaatcagttgatgaacggcatctaagcttgtcaatgattgctcaaattgaactttaagctcttttaaacggtctgaattaacaagactaatcacacgctctaaggtatcatgagacggacaaccttcactcaaatcaacgtaggtcgcaaacaatggttcattcatttcaataaaatcttccatctccttccaggtttcaatgccagctaactgacaaacaaagacaagaaatagaatggttgataaggggtagcgaattttccaagattgacgactatccaattcaactgcgcaatcatcaatagaaataataaaatcaatcatcgtagtcacctcatctatagtgtactactttgattgattttgtcattatgaatctagttttctgaaaacaaaagtttcttcatgcgtttggcgtgactaaattgattgttttttgatacagtaacaaataaaaaaggctaaaacaactgtcctaaccttctatttcaatttcaacaataagatgttatttacgtttacgtgctattagattaattggtgttccttcaaaaacaaatgcttcacggatttgattttctaagaaacgaagatatgaaaagtgcatcaattcttcttcgttaacaaaaacaacgaaagttggtggtttaacagcaacttgagttgcgtagaaaatcttaagacgttttcctttatcagttggtgttggattaatagcaatagcatccataatcacatcatttaatacagcagacggaatacgtttgttttgactttcgctaatacgtttaatcatatctggtaacttgtgcaaacgttgctttgtctctgcagaaacaaagataattggcgcataagacaagaattggaagttatcacgtatatcagcttcccactgactgacagtatgattgtctttttcgatagtatcccatttattaactacaataataatacctttaccagtttcatgtgcaaaccctgcaatacgcttgtcatactcacgaataccttcctctgcattaatcaccataagaacaacatctgagcggtcgatggcgcgcatagaacgcataacagaatatttctctgtgttttcatataccttaccagatttacgcataccagcagtatcaatcatagtatactcttgcccctggctatcaacgaaattagtatcaatagcatcgcgcgtagtaccagcaactgggctagcaataacacggtcttccccaaggatggcattaattaaactagatttcccaacatttggacgtccaatcaaactaaaacgaataatatctggattttcattttcctcttctaccggaagattttccacaatagcatccaatatatcaccagtaccaataccatgaactgatgacaagggataaggatcccctaaaccaagagagtagaaatcgtaaatatcattgcgcatctcaggattatctaccttattaacagctaaaataaccggtttattggtcttataaagaatacgtgagacatactcatctgcatcagtcacaccttctttacccgacacaacaaacacaataacatcagcctctgtcatagcaatgtctgcttggtgcttaatttgctccataaacggtgcatcaacatcatcaatcccaccagtatcaattaatgaaaacttacgatttagccactcacccgttgtatagatacgatcacgagtgactccttcaacgtcctcaacaatggaaatacgttctcctgcaattctgttaaataatgttgattttccaacattcggacgaccaacaatagcaactgtaggtaataccataattctcctctcactattgggaatactcccaattccattctattttattaacggcgattcggtccttctaagtggaattctatcgctaaataccgtacgcgctccataactcgttttgcttgccaagtttcgtcgcttccttttatattagcccattttctttccaaatcgttaaaactataatttgacgtaaagaaagtgggcaactcttctagcatacgatgttgtaatataacttgtaaaatctcgtcacgaacccaggacgttgcctgttcagccccaatatcatctaaaatcaaaatcggaacacttttcacagcatcaatttcatcttttacagttccgcttgaaatagcatttttgacatcaatagcaaaactagggaaatgaagaagagtcgttgacacaccctttctctctgataattccctcgccattgctgccattaaataggatttcccaacccccatatctccatataaataaagccccttgtgattatatgaaggataagtctctacaaaatcaagcagttgtgacatagctttcattcgactctcgttattaatatcaaagtcagtcattctgatattccgataggacttgggtagattaactaaattaatacgatcactgatagcttgttttttttgtgcttcaattaactctcgtgtttctaaataagaaacatctgcataaccttcattcataaccaaaataggctcatagcctttagcaatatattgactatccttatttttaaatttctgacgctcaatcaaaaattgattaaatttagacatgctgatatttatttcacgctgagaaagttggtgggttttaatgaactccgctacctgagcatctgctaaaatcatttgaataagctcatcatttgtattacgaggcactctcccttgattttctaatgcttgtcccactgatttcatgattcaccatcctttcctaatcgttctaaacgcttgagggcatctgttttaaactgttctaattcaatttctttttctgggctaacctcatctttataatcaggattactccattcaggaacattcgattgtttcttcttcgtttctgttttagtccttactttttgatctgaaaaatcacgaattttaagcacagcatcttcggccgtcataacattctgaaaagcaaaatcattagcaactttcatgatataggccttatttaagttagcagattttgtcttattcaaggtatataaaaccataacattaatgacttcgtctaggaaattcatttttgccaaatcctcaagtaaagtcttctcaccacttgttgtcactgccttacggcttctcttgattttttcaaggaacactagagcactatcatttttagattcccttagtatgaccttttcattatttgtaaaactctgattatctttaatatgctgcccctcattttgttgaactttcattcgctgaggcgcaatcattccattgatagctgtttgttttgctaattgataggtatcataccaatttaaatgataaagttctgatacactataaatacctaagacatcatctttttcattgttaaaacgtaagccatctcgcatcatcaaacgtttgaaactttccaagtcaaaaacatttttactccggtttacctcttgttttggttgtcctaaatccgagaaaacatctgtaaattttttagagatatctctagcatttttaggtattttcatatctaattctgccactgctacctctcctatacgtttttctaacaaacgacgatagatgggattagataaaaataactcatttgacatagcttgattcaacttaacaaggtaagtacctgtggcttggtaaacagtcaacaaatccaaagctgttaacattaccaatgcatcttgaaatcttggcatcccgtattgcagatgattgagaacctctgaaaatttatgacgtcgtattccgtcatcaaaaaaatgaacaaaataatcatagagtgccatggcatcacttcccataattgggaaatacaattgtattaaactattactatcataaacaatcttattttgcttaatatatgtaaactcatctattggactcatcacacgctaccactctttttactccgtacgcgctttgtaatttgttgaagtagttcttcaatttcatctacatctttaaaagatttataaacactagcaaagcgcacataagtaatctcatctaattcggcgagttcatccatcactaaatttccgatagtgatactagaaacctcatcttcatactcactcctaattttacgttcgatacgtaagatacaattttcaatatcttcgctcgaaacagggcgtttttgagcactctgaataataccattcaaaattttatctcgagaaaattgctcgcgagtaccatctttctttatgactaaaagaggcaattcttccaaacgttcaaatgttgtaaagcggttgccacatttttcgcactctctccggcgtctgatagtcgtaccttcttcagcttgtcggctatcaaccacactagatttattatagccacattttggacaacgcatgtcaacacccctattctatcatatcatttaatcatcttattttaacacaaattcagtaataacaaaagaagcgcctctcttatcacctcatcatatcaaaacacaaaataatccttatgccttttatcattaagcataaggatttttcttatatttctttagtttcttcaaatttttttataggaatgcgaacaatgaattcagtcccttgatttagttcacttttaatatccacctttaaatggtaagcatccataatttgtttaaacactgaaagcccgatacctaaaccagcttgtgtactttctctgttacgtgatttatcagttcgataaaaacgatcaaagataaactcaatatcttcatctgagataccttctcctttatcttttacaactactgtcgcaaaatcattgtctactgataaaacaacactgacttctttataactaggagagtacttgatagcgttatcaattaagatcatgagagcttgctcaaaatgtatcttatatatctttccccaaacgatatctgaaatattattttcaaaaataaattgaaaatcttctctcaaaatacggaaattttcaataacaactgatatagagcttgataaatctgtcacttcatcttgatgaagttccaagcttccttggacgcgaatcatatttaacatgtcattaatcattaaggacatacgatctgcctcatggtatgccgctgctaaactttcttcaagaatttctggatcatctttcccccaacgttgtaataaaccaatatgaccctttacaacagcgacaggcgttcttaattcatgactaacatcactaatgaattgtgattgtcgacgagtatagtcttccaactgatccaacatcccatcaaaaatcctagacaattctccaatttcgtcttctgaacggaccttacttctaatttctaaattactaggattttcagatatctgatgcattaagtcgtgtaaatttttaaccggacgaacaatacgcttagtagcactattaataacgaccaaggctaaaacagtccctaaaacttccatcataatcaagaaaacaatgatgttttgcctcatactataataacgacctaaattatagaaaatttgaacgtatccaagcaactgtcctgttttttgagagtagattgcttttgtaccaacaaaaccttccatatctgcaactttagagatgataacttttcccatggatttaccaatagttggcatacccgttctcagtgtagaaaaaactggtttcctgttgacatcgtatagggtcatttcttgattaacataaagaatactatcgattgactcgcccgttctaacaattccattttgacgcttatgaggatagatgtcatccgcaaaaacctggttgtacaggatctctaaaatatcatcggatgtcaaactagagttcgcttgcgacaaacgaactctagttttttctaatgacctaccgacattaattttttccctgtgaaggacgtatcttgttgccgaagtataaactaaaacagaaaatactgtaaataggctaaaaaataagataaaaactaattgcgataatttttttgacagaggttgttttacccctataaactgatcttttttatttttcacgaatcacatagcccattccgcgaacagtttgaatatatgattcacgacctgggatatcaattttacctcttaggtaacggatataaacatcaacaacgtttgtctctgctgccacatcgtatttccaaacatgttctagcaactcttctcgtgtcataacacgattcatatttgtcatcaagacattcaacaaatcaaattcacgttttgttagtgaaatttcctcatcaccacgcatcgctgaacgattatgagtatttaatgacaaatcacggaaactaccactatcacctttttcttttgtcttcgtttcaatttcttggcgtcggaaaatcgctctaacacgtgctaataattcttcgattgcaaacggcttaacaatataatcatctgctccacgatcaagaccagctacaatatccataacagaatcacgtgctgtcatcatcatgatataggttgttttttcagcctgcaggcgacgtgtgatttcgaaaccatccatctctggaagcattaaatccagtagaatcaaatcaaaatctttttctaatgctgtgtccaatccttcacgaccgtttgtttcaacaacaacatcatatccttcatgtagtagttctaacgagacgaagcgagctaaatttttctcatcttcgattattaagatctttttacccatctacaccaaccttcttattctttacttaacactatcaattattttttagaatatctagataaaaaacaagatagcccacattttactaacgtttctttaaataaataaatcgccatcccaaacaattgttcgatagcgagacttaatttttattattgagtagtgtcctctgtcacttttcaattctactaaaaaaaaattaaaatatcaactgatgttattaataatttttatctaatcactatcaaacataccttctaaggctgcgaaaggattagatttttctttttctttagcttgtttttcttcatactgcttttcagtcattaacgaccaatttttacctgataaatccgcttctaccccaacctcatcagctgccagaacacgaagaggtatatttaacaagatattatcgataacgctttcttctaaattaatatcatcttcctctaatattaagaccaactcctgatcaacgagctcttttttagtgctaacattttcagcttcaataaaaacttcattaatagtttgcttttcagataaaacaactggtttcatagaacgactagacggtaatgtaatatcgtaagccatattatagtcaagtagatagagaccatcttcatacaccacatgacctgaaacttgaatatcagaaatatccattatctctgaatgacgctccataagcgactctttgatatctatttttttatcaaaataaagcccctctggtgattttttgatttctgtaagtaacacgtgccatctccctttatagtatatgtcatattatatcaagttttacaggctttgtcttaaaaaaacaaaacgcaaggcatagctaccctacgttttgttaacgactacatatgacgcaaacgctcaatacgatctgcaattggtggatgcgtataaaataaagactttaacccttcttttttcgttgggtcattgatatagagagccgcactagcatcatctactggatgccccataggttcagaacgatcaagtttttctaaagcagagatcattccttgtggatttcttgttaactcaacagaactagcgtctgctaagtattcgcgctgtcttgaaatagctaattgaactaaactagcggctaatggtgcaaggattagtgataaaatagagaaaatcaaaaccaagatgtttccaccatcttctctgtcatcatcacgcctacgacctccgccgtaaaataacatacggctaccaatgcttgatattagagttacagcactcgctaaagctactgcaatggttgaaatacggatatcataattacgaatatgactaacctcatgtccaataacaccctctaactcttcgcggttcataacagctaataggcctgtcgttgctgcaacagcagcattttctggcttagagcctgtggcaaaggcatttagggagtcatcttcaacaatgaaaacgcgtggcataggtatctgagctatcattgccatatcttcaacaatatgaaaataatttggcgcctcatcttctgtaacttcacgcgcattgttcattgacataacaacattagttgattgaaaaatcatacttactgcatagataaccccaataattagagctagaacaagcccaaattggtagctgcctaataccaaataacctacagctgctccaatagctgctaaaagacagaagaagacaattaacaagacaactgtttttctcttattacttgcaatttgttgatacagcaaaagcctctctcccttctcaattaaaagtcaaaggaaacttttggcacttctttttcttcttcaggagtttctaagaattggcttggtttgaacccaaatagttttccaacaatattacttgggaaagtttctaatttcacattataattggatgttgttgtgttatataactgacgtgaataagaaattttattttccgtattagttagttcttcttgaagtttaacaaagctattgttggcttttaaatctgggtaattttcagcaaccgctaaaatacttgaaagctgtcttgttagctcattacttgctgtcattgcttcagcaggtgtgttagctttagcaacttgagcacgcagttctgcaatcttctcaagtgttttcccttcgtacgcagcatagcctttaacagtttcgattaggtttggaattaaatcgttacgacgtttcaattgaacgtctatttgactccatgattctttagtatgcatgcgacttctaactaaactgttataagcaacaatcaaccaaataacaaacaaagcaataattgctattaaaatcatagttcccatagtagtagctcctttacattttttccattatagcaattttctttagattaggaaagtcctgttattcccattattagtatttgtgataaaatagagtcattatacgatatagaaattgaggtttactatgacaccccaagcattttatcaagttctgatagagcatggtattacacttactgacaaacagaaaaaacaatttgaaacttattttagacttcttgttgaatggaatgagaaaattaacctaacagctattacagataaggaagaggtttacttaaagcacttctatgattctattgcgccgattttacaaggttatattgacaatagtcctcttagcattttagatattggtgctggtgcaggttttcctagtattcctatgaaaatcctttatcctgaaattgatattactattattgattcactgaataaacgcattaattttctaaacatattagctaatgaacttgaactttcaggagttcacttcttccatgggcgcgctgaggactttggtcaagatagagtatttcgagctaaatttgatatcgtaacagctcgtgcagtagctaaaatgcaggttctagcagaattgacaataccttttcttaaagttaatggtcgcttgattgcactgaaagctgcagctgctgaagaggaattaatttctgcagaaaaagctttgaaaacactattttcacaagtaactgtaaataaaaattataagttacctaatggtgatgaccgaaatatcacaatcgttagcaagaaaaaagaaacgcctaataaataccctcgtaaagctggtactccaaacaagaagcctttgtaaagttgggagctagtatgaaacatttctttgattacaagacaatgtctgtcgcacgtaaactcagcattagttttatcgctgttatcctattgggaagtattttactttcacttccaatttttcaatatgctaacgcccctaaaacacattacattgatcaccttttcacgactgtttcaatggtatgtgtaactggtttatctgtttttcctatcagtaaggtttataacggttgggggcagattgtagctattttactcatgcaaacagggggacttggtttagtaacactaatgtcgttgtcttactataccctaagacgtaaaatgtcgttaaatgatcagacccttttgcagtcagcgataacttataacagttcgacagatttaaaaaaatatctctatatgatttttaaagtaactttaactttagaagttttagcagccagcattttagccatagattttattcctcgatttggtttgggtcatggtatctttaatagtatattcttagctgtctcagccttttgtaatgccggttttgataatctagaggcaacgagcttagctcaatttaaactaaatcctttggttaacattatcgtttgtttcttgattatttcaggaggacttggatttgccgtatggaaagatttaattgaagctactatacaaacatctcacaagggaccaaaattaatcaagacatttccaaaacgcctcagcaaccattctaaactggttttaaaaacaacaaccattattttactaacaggaactttgctttcttggttgttagagtttggaaattttagaacaattgctaatttatctctacctaaacaactaatggtcagctttttccaaacagttacgatgcgtaccgctggattttcaactattgattatacccaaactgatttcgcaaccaaccttgtttatattatccaaatgttaattggaggagctcctggtggaacggcaggaggatttaaagtcactgttatcgccattttactcttactatttaaagccgaactgagtggccaaagccaagtgacttttcattatcgaacaattccttccagtattattaaacaaacactatcgattttaactttcttttttatcatacttattagcggctatctccttcttctggaactcaatccccatatagatcctttttctcttttctttgaggcatctagtgccttagcaaccgtgggtgtaacaatgaacactaccaatcaattaactctgggcggtcgaattgtaattatgttcctcatgtttattggtcgagtcggtccaattaccgtactgctatcaattcttcagaaaaaagagaaggaaattcactatgctgaaacagaaattattctaggttagaaaaggtcttttatgaaaacaaaaattattggtgtacttggtctaggaatatttggacaaacactcgcacaagaactaagtaactttgaacaagatgttattgctattgacagcaatcctgaaaatgtacaagctgtcgccgaagttgttacaaaagcagctatcggagacattactgatttagctttcctaaaacacatcgggatcagtgactgtgatactgttattattgctacaggaaacagtttagagagctcagtattggccgtaatgcactgtaaaaagttaggcgtcccacaagttattgctaaagctcgaaaccttgtatacgaagaagtactttatgaaattggtgctgatttggttatctctccggagcgagaatctgggcaaaatgttgctgcaaacctcatgagaaataaaattacagatgtcttccagattgaatctgatatttctgtcattgaatttaaaattcccaaatcatgggtagggaaaactgtcgaacaattaaatatccgtcacaagtttgatcttaacctcataggtatcagaaaagcaaaaaacaaacctgtcgataccgaagttccaatcaatagtccacttgaagaaggtattattctagtggctatcgctaactcagatgccttccaacgctatgactatttaggatactttaactaaagaaaataaaaaactgactattaaggtcagttttttattgccatgggttatagaaacgtccatgattaaggtgaattaaataaaggcttacaaacagactagctagagcaagtatgattaagacaatgtcacttttttccaaagattgcttagagtaccaagtacgtcttttatttttaccaaatcgtcgaagttccatagcagttgctactgtatcaatacgttctagagagctaaaaattaatggtgtgacaatctgcaaattccccttaatgcgtgctactaagttcgatttttttgataattctattcctcttgcctcttgtgctcgacgtattgtataaaattcttcttgaacatcaggtatatatctaagggtcaaactaacagcataagctattttatatgataaacctaattgatttaaacttgatgcgaactgactaggattagttgtcatcaaaaacaaaagagctaaaggcactgtacaaaagtattttaaaatcagattaaagaggtaaaacaactcttggctagtcacatcatatgggccaattccttttaacaataaagaagaactaccataaatcttatcaccataatggggagcaaaaagatagaccattataatatttaaaacagcgaatacaacaactaaagtcataacaaaggacacctgttgccatttgatttttgctaatctaaataagactagcgatcccaatgaaacaacaattaaaaatcttgtatcataagtggtcatgcaagcaacagaaactaaaataaaaaatagtaacttactggcacctgatagcctgtatagaaagccataaccctcttgataaccaattaattgtttagccattcttacctccttgattatcaatgtaccattgtgttagtttctgtggagatatccctaatctgtctgctaaagcaaataaactcgttttctttaaatgagtctttttcaaaagctctgtatttgaaaggatgttaataggatgatcatctgcaacaatcagaccattgtcgattacaattgcacgatctgtatactctaacataagctgcatatcatgtgtaatcataacaatggtatgtccatcacaacttagtttatcaaggaaagacatcatttcagtataatgcttcatatcttgaccagctgttggttcatccaaaataataacttctggatttaaaatcagtatcgaagcaatcgtaacacgttttttctgaccgaatgatagagccgatataggccaattcctaaattggtagagcccacaaacctttaatatatcgtagacacgactttctatatcattatcactaaaacctcttaaacggagacccagagcaacttcatcaaaaaccatcgcttgacttatcatctgattgggattttgcaaaacatagccaattcgttctgctctttcttttatagagtcttgactgacatcttcattattataaattagagtagcattattagggataaattgacataacgctttagctaaagtagatttacctgcaccatttttcccaacgatagctaaccgctgacctttatataaatcaaacgaaacatcatctaaagtattattctctaaatcatatgacaccgacaaatgctgtactgataataatttatctgtatgtttatctaaatctaatgctcgcattttaggtatcaatagttcactgaaatcaaagtcatcaatagacgtcattgtattttgtttttcaaagtcatatcctaaatttttgagagcagaaatatacagtggttctcgaataccatattcagataaaaaattagtttttaaaagttgatccggctccccattataaataatttgtccatcactaaaaagaactacacgatctactcgctcataaaaaacatcttccaatcgatgttcaataataatagtggtcgcatcttgctcttgatgaatacggtcaaccaatgccatgatatcttgtcccgattgtggatctagattagccaaaggctcatcaaataatagaattgggctatcgtctactaaaactccagctaaactaacccgttgtttttgtcctcccgacaagtcttgtggacgtttagacaaaagaggagctatttctaaacgttttgcccacatttcaacgatagaggccatttcttcctgtgctacaacatcattttctaatgcaaaagcaatatcttctgctactgtcaatcctataaattggccatctggatcttgtaaaaccgtagaaactaaatgagacttgtcatatattgacaagtcaaaagcatttttatggttaatcgtaaaaataccactatattggcctttatgagtatttgggataataccatttaaacaatgaccaagcgttgacttccccgaccctgaaggtcctaatatcaagaccttttcacctttaggaatgcttaagttaatcccttttaaagttggttcagattgaacgtcatattgaaaggtaaaatccttccattcaataaaatctttcatagattactctcttatcctaatctttggataaactacctttttgtggtcgtgatttagcgtatgctagcaacaaaagcgtaccacctactccaatagtaatggaattcacaaggcttgataagaaaccttgtgcaaaaactttgcttgcaggttcgctataaaagaaaatatcaccatacggtgcaacgacagaccaacctataaggttagcaataacttgaactacattaaatagaagcaaatccttcttagtcatgccagataattgaatagctaattttttagcaaaaaagcctatcatcaaacctaaaagaccactaactaaaacccaagtccaccacggagaaccatattgaatcgaatctttcaatgcgtgtccgataaaaccagtaaaaaaaccaactcctggtccataaataactgcaaataatgctaaaactgcatactgcaattgaatattagtatttggaattggtgttggtatattaactagcatacctataatgataaaaagtgcagctccaattccagtcgctacaaccttttttattgtgtttgtattcataaaaacctctctgaaaaacaagcttaaacagtcacttacaatctgttctattttatcatatttcaagctgatttgaaaccttattgacaagaagaactgaaaaacgattgaaaataatattaaataccaaaaaagatctcagatagaatacctaagaccttcattagtttatttttttccaaaaactgatttttcagctacagccgtgaacagaacgtctgtcgatgaatttaaggctgtctcacacgaatcctgtatcacccctacaatgaaaccaactcctacgacttgcattgcaacgtcatttgaaataccaaataagctacatgccaccggaatcaataaaagtgaaccaccagttacaccagaagctccacatgctgatacagcagcaaccacacttaataagaatgctgttggaaaatcaacagtaattcctaaagtatttactgctgctaaagtcaggatattaattgtaatagctgcaccagccatattgatagctgcaccaagcgggatagatactgagtaagtgtctttatctaatcctaaatcctcacatagtctcatattaacaggaatattcgccgcagaactacgtgtaaagaaagctgtaatacctgaatcctttaagcatcgtaataccaaagggtaaggatttttacgcatcataacaaaagcaatgattgggttaacgacaagagctacaaataacatcgtacccaccaaaactaatattaaaagaccataatcacctagtataccaataccgttttctgaaatgctagtgaaaaccaaccccataataccaattggggccaaattgataatccatttgacaacttgtgaagtagcatcagcaaaagtttgcattaaatcttttgtacgctgattactgcttcgcatcgccaaaccaaaaataaccgcccaaaatagaatactcatataattggcctcggtaatggcatgaatgggattatcaacaattttcaacaaaagagattgaaagacttctgaaatccccttgggaggtaataagtctgtctttgctggcgttttcaatatcagtgtcaaagggaaaatatagttcacaacaacagcgattagggccgctgcaaaagttgcagtgatatacaaaccaattatcgttgacatattggtcttaccgccctcacggtgttgcgacaaggcactaataactaaagtgaaaactaaaagaggggcaatagctttcaaccctcctacaaaaagttgaccaagtaaaccaatcgcagaggctttagggactaaaatacccaagaataagccaataacgactccaattgttattttttttatcaagcttgtttttctccaagcttttaaaaatcgtttcatactaaactcctaaaaaattcttaaactctatgatatgataaaaaaaaagattcgtcaaataccttttttattttttagaggttgacgaattctaaatttttctgatataattactttttgaaatattcaatcaatttcgaaaataaaatatttttttgtacagaaaggtacattgatgaaactaaaaaacacttatatcattatcggcttgatgctttttgcgctgttctttggagccggtaatcttatttatccagcctacttaggtatctactctggttctaattgggcgtgggctatcattgggttctgcttaacaggcgtaactttacccctacttggtgttgcagctgtggcgtactcaggagcaaccgatgttgaaagcttcaccaaacctgtctctaaaacatatgctattttctttgcagtagcactatacctatctattggacctttctttgccattcctcgaacaggggcaacctcattctcagttggtattcaacctatcttaggcgacagctccttagtcaaaattatctatggtttaattttctttggtatttcttatttcttagctattagacctagtcagattgtagatcgtattggtaaatatctaactccctttttactaactgttattagtattttaattattgcctcactcatccatccagctgctatcgttggaacaccacataacgcttcaacgaatgtcagcgatgctttcaaggatttaccattcctagcaggactgattcaggggtatggtacaatggatgcccttgcatcaattgcttttgctattatcgttattcaagcaagtaaacagtacggagcaattaccaaaaaagaaattacttctatggcacttaaatctggtgctatcgctacatttcttttagcttttatttatatttttgtaggacgtattggtgcaacttcacaaagcttgtttaaatttgcaaatggttccttcttacttcacaatactccaatagacggtgggcatgttcttagtcaatcagctaacttctatttaggaattgtgggacaagctattttaggtacggctatttttcttgcttgcttaacaacagctactggattaatcactgcttgtgcggaatacttccacaaattacttccaaagattagtcacattacttgggctacaatctttactttaattgctattacgttctattttggtggtttatcagagattatccgttggtcactaccagttctctaccttctctatccattaactatagtcttaattttcttagtcttttttgatcaaaaatttgaaagtagccgcattgtctaccaaacttctattgccgccactgctgtcgctgctttatacgatgccttatcaaaactcggcgaaatgactggtttatttaccattccatccgctttgaccacattctttactaaagttgttcctttaggtgaatattctatgggatggattagttttgcaatttgtggtgtcttagttggtcttattctaaaaaaagtaaaagcataataatttaaagcagtacgaaaattactgcttttattttaaaataattattgtaaccgctttcttttggtggtataatagccttgaaaataaataatttttggaggaactctaatatgagagctgcaacttatctttcagctaatgaattatcacttactgataaggctaaacctcaagtaataaaacccacagatgcggttgtaagacttgtcaaaacaaccatttgtggtactgatctacatatccttggtggcgatgttcctgcttgtaaaccaggaacaactttaggtcatgaaggcattggtatcgtcgaagaagttggttctgctgtcaatcattttaaagtcggagataaagtaattatttcttgtgtcactgcctgtaatacttgctattactgtaagcaccagttgccttcacattgtgaagatggcgggtggattttaggacatcttattgaaggtactcaagcagaatatgttcatattccacatgcagatggtagcctttatcatgcacctgaaggtgtttgtgacgatgcattggttatgttatctgatattttaccaacttcatacgaaatcggcgtcttaccttctcacattaaaccaggtgatactgtttgtattgtaggcgctggaccaattggactatctgccttactaactgcacaattctattctcctgccaaaattattatggttgatttatctcaaaaacgacttgaagcctctaaaaaatttggtgcaacacacaccattctatcaacgtctactcaagaagttaaagaagaaattgataaaattaccaaaggccgtggcgttgatgtcgtattagaatgtgttggttatcctgcaacatttgatatttgtcaaaatgtagtttctattggaggacatatcgcaaatgttggtgttcatggtaaacctgttgaatttaacctccaagatttatggataaaaaatataacccttaatactggattagttaatgctaatacaactgaaatgctccttgaagttcttgagacaggcaaaatcgatgcaacacaactagtaacacatcacttcaagctatctgaaatcgaagaagcttataaggtatttaaagctgctgaagaaaacaatactctcaaagttatcatcgaaaacgatattactccagcctgataatttttaaacaaataaaaatgtgagaagaatagccttctcacatttttatttatgactcaagcgacgtgttaaaaaatcacctaaaaattggataaagaaaattaataataaaatcagaatagtcgctactaaagtaatatcatcacgagaatagttatatcctttagtaatagcaacagaacccaatcctcctgcaccaatagcgccagccatagctgtttcacctactaaagaaatcaaagtaaccgttgatactcgaattaaatctggtagaccttcacgaagataaactacaataatatcccaaagtgttccacctgaggcttgtgcagcctcaataactccaccatcaagttcagctaaaacaacttgaacttgacgagcaaaaaatgggaaaactgccaaagaaagaggtaccaaagctgctggtgaaccaagtgttgttcctacaattacgcgagttactggcgcaatcaaagcaagaagaataatgaagggcagagctctaaaaacagaaacaactttatctaaaactccaaatactaatttattagcaataactcctctaggactagttaaaacaaggaataaacctcctaacaatcccattaaacctccaataaggaacgaccaaaaagtcatataaagggtttgtacaatagctgtctgccagccgtaagcaccttcccaacccatttgatatacatttggtaaatgtgtttgaatccactctatcatgctttaccaccttctttcaataacgttaattgaacttgcgaatctgtaattgcttggcaggcttgtcttaatttttcttcgtcacctgataagataactaccatttctccaactggaataccatctaaaatttcaatattcccatagaggatgttagcagttacttcaaattctttataaatttgatttaaaagcggctcatccgtgctatgcccagcgtatttcagttgaactaatttgctacctactggtagatttttgacaacttcttgttgctcaatcttaagcattgcctcatcaataccagtagctatttttataaaatcttgtgtaagactctctctaggatgtgaaaaaatgtctaaaactgatccttcttcaatcaatttaccattttgcataacagcaacgcgattagcaatgtctttgacaatttgcatctcatgtgtaatcaaaacaatcgtaagtcccaattttttattcagatcttggagaagggcaagtatttgttttgttgttttagggtcaagtgcagaggtagactcatctgaaattaagattttaggatcgttagccaatgcacgcgcaatggcaacacgctgtttttgccctcctgataattgtgaaggatagttttgagcacgatcggataatccaacaagttctaataatttagcaaccttagctgctttcgcctcttttgataaacctgaatgtttaagagcaaaagctacattctgctctgctgtcaactgtgacattaggttaaaatgttgaaaaatcattccaatttcacggcgctgttcgcgtaattgtgtgctagtcagtgtcaccttgttgtcgtaaataacttggtcatcaatagtaattttacctgctgaaggttcttgtagcaaattaataacacgaacaagggtagattttccggctcctgaataaccgacaattccatatatatcaccttgattaatatggatagtaacatctttaacagcattaatctcacgtttcttttggtggaaagtaacatcaatgttgtctaatttaataattggttctttactcatatgattctattaaagcctccactaattcaatatgggtgtaataatcagcaatactaacattttcatcaacgccatggtctcgactattggcatgtcctatgccaatagctgcaattggcgctcttagagcttgatgaactaaatacattggtcctgtacctggtgaggtaggtaacagagatatcccttctggataaaattgctcagctaaatcaacaacctttaggatagatggcgctgacatatcactacgataagacatttcaccaagggtataggttagctcaatgtctttaaagccattctctttcaaatgattttgtattgaatctagtacacctttcggggttaaccctggtactaacctaacctctgctttacatttagcataagcaggtaaaattgttttgacgccttcaccttgataacctgaggttataccttcaatggctatagaaggttcaaaataaagctttctcaaaaaagttttatgactatctgctaaactgggcaaaactaattggtaagcaccttctagcgcctttgcagatctataagaatatttttcaactaattctaactctctcttagtagggggaataactttatcataaataccttctaccaatatatgacctttgttatcccttaacgtattgagggcttgaattaaataccatgtcgaggaatcaacaaccccaccaaaggatgaatgaatatcaacatccgctgaacttactgataaatcaaaagtgacaatgcctttatttccaccagcaatttccaactgtcctttaggatttttagggccatcttcccacacgatcaaatcagccccttgtagctgctcttgatacttttctaaataataatcaaggcctactgaagctgattcctctgctccttccacaataaaagtgatatctagaggaagttcccctttgtgtcttgataaatattttttaactgctgataaacgtgcggtaatgtgacctttatcatcatctacaccacgtccatacatcttaccatatcgaagtgaaagtgtaaaagggtcctcagtccactgttctacctcatctgctggtacagtatcataatgattgtaaaaaataatacgcttagcatctacttttgatgatttgaaatttgccacgataaagggagcgctatagctgtcatctataatgacttctgcgccagcttttatgaaaacttctccaagatagcttgataagtcatttaaaccaactttctgagcaaaaattgacttaattgcaattaaatctcttaaaatattgatatcatcctgaacaatagtatcagatagaaacttttgaatttgattttcttcgtttgttaaagtcatctttcatccaccttccttcaaaaacaatccaagagcctggcacattgtattcgtcccaggccctttatggctatatggctgataagttgtatcctattaggattccctgttaaacttatacagtcaattcacgttaccattgtggaatatcagctgaagtatctttgataacttttttcacttcatctgtgtgataagcatccaagatagcttggatagctttagcgttcttttgctttttccaatttttacgtcccgcaatgatattaatccattgttttgaatttttatctgatttctcaacaaagatagcatctgaaggttttaaattagcttgctcaatgtatgtattattaataatagctgcatctacatctttgagtgcacgtggtgtttgactcgcatctaactcctgaatattaatatcctttttattagatgtgatattagcaactgttgcaaccttcttaccagaaacattcaatttgattaaacctgctgactgaaggacatacaatgcacggctaccatttgttgcatcatttggaattgcaatagtggctccttttttcaattttttaagagattttaccttctcagaatagatacgaattggagctaagtaagtcttttcaagtggaattaagtttttcttattttccttattccagttttctaagaaattgtaatgttgaaaggcattaatatccacatccttattggctgtcgcttgatttggttgtgtataatctgtaaattctgtaaatttgattttagctttatcacctactagcttttcaattttatcccaacgtgctttttcagtgtcagaaaaggtcataacaccaactttaacaactttacttgaagttgagcttgctgaaacttcttgattactaaatgtgactcctaaaagtgttgttaaggctaatcctaagacaatatgttttaacttcataataaattccctcaatttttgtgataaagatattatcccataggaagttattagaatcaaattgttataaactgtctcttgttatagttttaaactatataacaaaaaactaaggattgacatctccttagtttttattactacttctccttaggagtaacgagatctttctcatttggtacgtaatcacctccaaggtattctttagctatttttgaaagtgtcccatctttacgtaattgtttaaggcgattattcacatacttttgcaagtctttttgatcctgaccaaagatgaaataaatataaggctgatctctcatagtcaaagggatggtttttaaattcgtgagaccttgattctttatgatagcgttaacagttggtccgtcaaaaagtttaaaatcagcttttccatcactcaaattcgttagaatctgtgtaatattttcattagtatattttagagtaacaggatttttctgatgctctttattgaaattttctaattgcttggcagttgtcgttccttggacaacctgtgttttatgaccactaatatcattataagctttgatattactattcttaggaactgctaaaactgaaggagtagagcctattgggtatgaaaataaatatttttgagatctctctgatgaataagaaatattatttccacccatttgaaactttcctgaatcaatgccggtaaataccgatgaccattctgtttttttaaaagtgactttatagttatctgaacctttaaaaacagctttggctacttcaatatcaaagccagtcagtttcccatccttcacataagaaaaaggtgccgttgttccaacagttgcaaaattaacttcttttttgcccgtcttagtagtatgagattttgagctacaagcagctagagacgctactgtcactaaaataattcctgttacacttaacactttttttattgtcatcttttttctcctctttaattgtacacgacatcataacatctttaagtttttaactaacacttatcttctatcgtctgagagtttttgctattatatggatgctacgtttcattaacaaaataaccaaataaggtttggttttcaatttggtgaagcattaattctggatgccattgaacacctataatacattgttctgttcgactttcataagcttctactgtcccatctctaggatctctagcactaactatcagaccttcagctaacagtttaacactttgtctatgaagagaattgatcttaaaatcacctgatataaagccttctagaaaactccctttttccacatttaaataatgagcaaatccaatgtaaggctcttgatagtgattatcaatagattgattaagtgtaccaccaagcgccacatttactaactgcatgccacggcaaatcgcaaagattggtttattttgtttcaacgcttcttcgactaatgcaaattcaaaaatatcacgcgcaagtgaataatcatcactctcaattatcttctcttcaccataataggatggtaaaacattttggccaccagatatgatcagcttatctatcatctcaacataagctttggcactttctgcttcacttattggtaggataactggtaacccgcctgcgtttttaactccttccgaaatatgcctagataccgaatcataataataacctggaatatctgacatttctctttcatttcctgtaataccaataataggctttgttaacattttgctccctcatcaaccaacaactgtctaataattatcattttacacctaaaaaaactttttgaataatattttttacctatcacttctttaacaatacctatcaactctcacaaaaataaaaaccatagtattaatactacggttttattttttagaaatctgctacattatgataaactttttgaacatcatcatctgattcgagtgcgtcaataagcttttcaaaagtttcaaggtcatcaccttccaatactacttctgattgaggaatcatttcaagttcagtaacttggaattcttctacaccattatcgcgaagtgcttggatacctttatgaagatctgttggggcggtataaactgttattgttccctcttctgcttcaacatcatctacgtctacatccgcttcaagtaattgttcgaagacagtgtcagcatcatcaccagcaaaaacgatgacaccttttttatcaaataagtaggataccgatcctgaagctcccatattgccaccgttcttaccgtaagcagtacgtacatttgctgccgtacggttaacatttgatgtcaaagtatccacaataatcattgaaccatttggaccaaaaccttcatagcgtccctctacgaaagtttcatctgtgtttcctttggctttatcaatcgctttatcaataacatgctttggaacttgtgcttgcttagcacggtccaaaacgaattttagagctgagtttgactcggggtctggttcaccttgctttgcagcaacatatatttcaacaccgaatttagcgtatacttttgagttagcaccatctttagcagtctttttggcaacaatattggcccacttacgtcccattggaaaatctcctttgatttcatttttaataacctgctggctcatattggcaagcaatcttaattttaactctattattatagcactttgatagcaattggtaaaatggaaattctatcaccaagctctagcatctgtcttatgttttaagtaatcaatccatctactatcctttacacgacacaaggtaactgataaaccagccatatctaaacttgtaattaggtggcctgttttaataaaaggtaattgtaaatcgtctaaagccagaaattccatgacagcatttgtaaaaagtaattcctccattttagaacttcctccaagattatttatcaatagaatgaatgcttctccatcttgccaacgtaatttcattttcaatttgttaactagttcgtttgccaaatgttccatggacacgaaaggcattgtccggtatcctggctcaccatgaataccgattccaaatgagatgtaaccttcttctatatcaaaaacaggttgatgctgacctaaaatagtggctgacttacttgctacacctaaagtagccattgaagttgtcaaagatagtcctagctgttctaattcatctaagcttgctccttctaaagcagcttgtccaataattttatgtagcaacacagtaccagcaacgcctcgatgacgaattttaaaatttgatgtttcaacagagatgtcatcatgagaaacgatgtatttgattggaatgccttcttgacgagcctgttcaatcgcttgggaaaattcttccaaatcagcttcaaaatttttgataataacaaagacacctttgcctcgattgataaatctaatagtctctagaatatcactagcacatggtggtacaaaaataggaccactaatcgctgccgatagcattccctcaccaacatatccaaagtgagccggctcatgtccgctgcctcctcctgataaaatcggaattacttgctcggattgccctaaataatgaatagcgggcaaatcttttatttgctctactttaggattagttttagtgattgcttttattgtttcaaaaacatattccattttatgatgttctgtttttctcatatccttgtcctaataattttctattgatgttctgataattttttcaatgactttcctattaaataattcttcttttgagttatttattaactcatattttataaaataagagagggctttactatgataattaataaatgtaactctttctttctgattaaagttagatttactataatcagaaagaagcttatctactaactgctcacagtaagactcaaaatacgaagaaaaatcattttgatcttcaatttgaaataatttaatatagaattcttgattcattttaaaaaaagtcaacaactctgataacaactgaaaacctgagatatagtctaaattatccgtaacttgttcgcttaattctgtttggaaaatccattctaataaagcatatttatcaacaaagtgattataaaatgtttgacgtctaatacctgcatcttccataatatcactcaccgatattttgtcaaaagcttgcgaaataaataaacgtttaaatgacttggctatttttttcttagtaataagcgaagaagtcataatttctcctttattttatattgaattgctgatgatttattatggtttagtgtaacatgatttatgattattgaaaaccctaacaaagcggacaaacaagaaaatctgtccattccagaaaaggcttacaaattttataataaaagagaattaaacataaaaggagtttccaaatgaaaaaaattctcaatcaaccaactgatgttgttactgaaatgctagatggattagcatatgttcataatgatttagtacatcgcatagaaggttttgatatcattgctcgcaatgaagagaagtcaggaaaagtggctctcatttctggcggaggaagtggacatgagccttcacatgctggtttcgtaggcgaaggaatgttatctgcagctgtgtgtggtgcagtatttacttctccaactcctgaccaagttcttgaagcaattaaagaagctgatgagggggctggagttttcatggttatcaaaaattattcaggggatatcatgaactttgaaatggcacaagatatggctgaaatggaaggcatagaagttgcaagtgtggtcgttgatgatgatattgcagtcgaagacagtctttacacacaaggaaaacgtggtgtagctggtacgatactcgtccataaaattctaggacatgctgctcgtcatggcaaatcacttcaggaaatcaaagctattgctgatgaattagtaccaaacattcacactgttggacttgcactaagcggggctactgttcctgaagtaggcaagccaggatttgttcttgcagaagatgaaattgaatttggtatcggtattcatggtgaaccaggttatcgtaaagaaaaaatgcaaccttcaaaggctttagcgacagaattagttgataagttaattgaatcgttcgatgctaaatctggcgaaaaatatggtgtccttattaacggtatgggtgcaaccccacttatggaacaatatgtctttgctaacgatgttgccaaactccttgaggataaaggcattgaagtgaattacaaaaaacttggtaactatatgacttcaattgatatggctggtttatcactaaccttgattaaactggaaaatcaagagtggttagaagcacttaatagtgacgttacaaccattgcttggtaatcattcctgttaattagaacaaaaggaaggaactcttatggaagtaaaaactgcaatagaatggatgcacacttttaaccaaaaaattcaatccaacaaggactatttatccgaactagatactccaataggtgatggcgaccatggtggcaatatggcgcgtggtatgactgctgttattgaaaaccttgataacaatgaatttagtagtgctgccgatgttttcaaaaccgtgtccatgcaacttttaagcaaagtaggcggagcatctggaccactctatggttctgcatttatgggaattacaaaagctgaacagagtaaaagtaccatttcagaggcacttggcgcaggacttgaaatgattcaaaaacgtggtaaagctgaacttaatgaaaaaacaatggttgatgtttggcacggtgttattgaagcgattgaaaaaaatgaattgactgaagaccgtatcgattccttagtagatgctacaaaagggatgaaagcaacaaaaggacgcgcttcttatgttggagaacgctcagtaggacacattgatccaggatcattttcttcaggattattatttaaagcattactagaagttggaggtgtctaatgtctgatattggtattattgttgtttctcactctaaaaatattgctcaaggagttgttgatcttatttcagaggtagcaaaggatgtctcaataacttacgtgggtggaacagaagatggtgagattggtacttcttttgatcaagttcaacagattgtagagcaaaatgataaaaagacgttattagctttctttgatttaggttcagcaaaaatgaatttagagttagtagctgatttttcagaaaaaaatattatcattaactctgtcccagtagtggagggagcttacaccgctgctgctcttctacaggcaggtgctgacctggatagtattcaatcacaattagctgaattaactatcaataaataaggagatattatgactcaatttcttggggaatttttaggaacatttattttggttcttcttggggatggcgtagttgcaggaaatgtgctcagtaaaaccaaagaagaaggaactggatggactgctattgtttttggctggggaattgcttgtaccgttgctgtttatgtttctggattattcagtcccgctcatctaaatccagcagtcacattagcaatggcttctattggagcaatttcttggggacaagttatcccctttatcattgcacagatgttaggagcaatggttgcggcaactattttatggttacactattatcctcattggaaagaaacaaaagatagtggacttatccttgccagcttctcaaccggacctgctatccgccatacaccatcgaatctccttggtgaaattatcggtactgctattcttgtgattacaattatggcaattggtcctagtaaagttgcagcaggtcttggtccaattatcgttggtatagttattttcgcagtaggattctctcttgatccaacaactggttatgctattaaccctgcacgtgacctagggcctcgtcttatgcatgctatcttacctattgaaaataagggtaactcagattggtcatacgcttggattccagttgtaggtccaattatcggcggtgtccttggggctatcttatacaatattgctttgactttagtttaactaaaaaaccagaaagttaatactttctggtttttcatagttgcagtatgctttcaaaatagaaaaaacaccaaaatacttagtgttctttctggagattttatgaaaaaagtttaggatgtttatagtataaccgcccttacttaacgtttccttaaaagctcggttattaacattacttcctaaattactatttatattctccaagaaatgactactattaagctaaaaagcgctattgacatagcgctttttagtctagtattatttagtttcagtagtaactccatcaaaatcttcttcattttcttcagcttcttctcttgtggcacggataataccatctttgtgatgagctggactgtaaattgtatagagttttaacatctcagtttcagaagtgttaattacgttatgttcagcacctgccggaactattatagcgtctccatctgcaacttcatattcattaccatcaatgacaaccttaccatgaccagcttcaaaacggaaaaactgatcattttctgcatgaatctcgctaccaatttctccaccaacaggcagtgtcattaaaacgagttgacaatgttctgcggtatagaggacttggcggaaatttgtatttcctagtgtcaatttttcgatattcccatgaaatcctttcataacgatacctacctttctatgcctacagtctactctttttgctccttactgtcaaaaatttagataagagtctgacatttttaataatatctactgttccttgattcctatcatttcattgcaaacctaaaatatagcctaatgacaatagctatctatagctttagaaacaaataatgctgttccctggcctccccaattatcaatagacttttggaaacgctcatcttggatgtacattattccaagacttgctaataaatcgttagtgcagttgtaaaactgagctgtgatataatcttgtaaaatctgaacttgtttttgaactttctcatctgtcggagaaagttctttcaactgtccaaagtctttaaaaatctgactcatagcttgtgaaatcattgaaaaatcattcttactatggctattttcaaattctttgtaactatctgtatccccccagcgtgttctagcttcctcttgaaatgcttctaattcttcttgattataagctgtaaaatctgacatatttttacccctctggatagactttgcatgttcaattacttcttctagtcgctgtttctttagttccagccacctaatttgatcaagaagtgcttgattacgatcataatttggactatccattatctcttttatttttttaagaggaaattccagttccttaaataacaaaatttcttgtaacttaatcagtgattcatcatcatagtaacgataaccattctctcctacaaatgaaggagataacaaatctatttcatcataataatgaagtgtgcgcacactaataccagaaatgtgacttatttctttaactgttttcataataacctctctgtaaagagtataatgtataacgttaagtaagggtcaagggaaaaatattattttgtgatgattaatttataaagcttaaatcaaaggtcactttgactaacaggttgataaaaagggatacgtccccatgtttgctctgctatattagcatttcccatctgataaacagaatctgctcgttgcgtcaaactatcccacgtttgtgaaccaatcctcgtcacgatatccacagacttcttcacagactttaaatgctgttgacctttttgtgtaaaacctaagacatgaatagcatttggtataggactttccacagcatttatcaagatataggttaataaacgtcgaattcttgctttggtataccgtttagttgcgactttatcaactaactcatccacagtctccacataacgaatttgactttttatacgattggctatctcttcattcacttgataaatttgtgtcaaatcagaatgcgtcattatctgatatttgagtaaactaaaataatcttgccaaactacttgtggactattcaaaaacaagtcactgttaggcatacctttttctacaaagaaacgatcagattgatgtttacgaagacttgttgcagaagcaaatatctctgttttttctgatgaatgataaccagctccttgacgttgtatcggatttaatcgaataccattttggctagctgctttggtgtaggctaagcctaaaatgtgatttggggtttgtcccgaaaatgtaatccctgcaaattcttgccacatagcttgcattttttgtggataggaaagagaatccgattgttttttcaaaaaagcttccatctcctcttttttattcacataaatatccccaatacgggcataatcaagcatttcttcggtaccgaagcataagttatccacacctaatcgtgccaggatagacacagctccactagcgaaataatccgctgactgtaccgaaaccagaaaagggagttcaatcactaaatcagcaccattttctagtgccatctgggaacgggtccatttatctacaatcgccggctcaccacgttgcataaaattacccgacatggctattacttttatgccttgagcttgttctaaaaggtacttatgcccattatgaaagggattaaattcggcaacaattcctgtaactgtcatacttctttctctttcaattgattatttaaagtaacagcatcaataatatctaggtgataagttttacgaaggtatatgagacgatctgtttctttttcaaatggttttaatgccgataataaatccaaatgaagtttagggttcatcaataattccaaaataactttagactttttctgacttacccgacgttcaataatataaagtatcccaaatatcatcagacaagcgtataagaatattatcatctttttacctccaaattattacttatttatgagctacaaaaaaccagcgagcagaagttgcagttggttttttatcttcaaaatctgcatacaccttaacatctttaaaacctgcctgttcaagtaaaatatcataagtcaaaatatcataagtacgctcttcatgaacttcatcatgacgtgtaaatcgaccatcttcttcttgaacaaaaaatgttaattcatggacaatagaatgaggtgcatcatcttcataagtatcccacaccatagcaaagtcatctgcattttcatgataagaataaccaggaaatactttatctgtttgataagtcgaatgaacatcaaaaataaagacgccattttcttctaaggccttatagacttcgataaaaacatcaccaacctcgacttcatcttgcatataacaaatagagtctgaatagcacgtgatgagatcatatttaccaacattagataaatctaacatatttccttcaataaactggatactttggtgagcagaagttgcacgttttttggcaagtttcagcatatcgccactaagatcaagtcctgtaacagcataaccagcttgtgcaaatcgaacagactgaattcccgtaccacatgctaattccaaaagttttttcttaccttttggaaaatgacgaagtgaaaaatcagtccatttagcatataaagtatcatccatgacagcatcataaacagctgcaaaagtttcatacgttgccatataatagttctcaaatctttcttgatattacatctctcaaaaagcagtcccaagactgcttagctttattctgtcataaagacttcagcatcaagcaatggtgcttcatgccaaagtttttcaaggttatagtgctgtctctcatcttcagagaagatatgaaccacgacgctattgaggtcaagaagtacccaaccagctttactatcgccttcaaggtggctagcatccccaccatttccttttacttgttcacggatattgtctgcgattgcttctaactgcctactattacttgcactcataatcacaaagtaatctgcaacactcgttacaggctgtaaatctaaaattacaatatcttctgctcgtttttcatccgcagccttaacgactagctgtagtaagtctttttctgtcattttattcctcgtttattaatttcaataagctatcttttgctaccattgtcgcaaaacgatgatgccaaatattctcgtaatgttttttaatagaatccccacttaaagttggtgtatcaaatgttaggtgtccaccttgtggaataaagatatcataaccatattcaaaagcaacttttactgatgtatcaaaacagtattctgtttgaagtcccatcatgattaattgactaatatgcttactttgcaagtaatcatgtaaatgagtatctttaaaacaactattgtaagttttatcaattattttgtgatgcgtcacaagatgtcgctgttcccaaatttcccactgtggagaaccttgaggcaattccttatcatgatgccttatccatatcacttcacaattagaacctttggcacttaaaagtaaatcatctaaaagcactgcaaaatttgttaaatgctttggtttcttatccataataccttgttggatatcaattagtaaaagtgcacaagtcatactttcctccaaaatgaccactgcatcgccaaacctatcatgaccattattcaataaaagaattagtcgagataaggtatataagcattataggtttcaatcgttttaggatagataggctgagccttacttgctaaaaacgcaactgttctagcagtctcataagctactgctttattaaggtcaactttcgctaactcacgagcttcttcaactcctggaaaatctcgattgtgttcaatgtaatctgctacataaacgattttatccaatgtggacatttgggctgaaccaacagtatgttttgcaatagcagctaaaatatcttgatctttgatagctagatcctcttgtattttataaatgccaacaagaccatgccaaatattattaccccatttttttaggtcgggatctggttggtatttatcaattaatctaagaaattcatcatcagatagttccttagcataatcatgtaataaagcagctagacccgctttttccttgtcataaccataccgttctgctaactctattgcagcacgctctactcctaacacatgattaaaacgtttgtcggacatcatatgacgcactttactcaaaagttcagtccgatctaaacctgtgtaatctttgtaggtcatttgtaaagaccttctttcctgatataatctaatacctctctaggcagtaaatagttgggctgacgattacttttaataaattgacgaatcatacttgatgagatatccatcaatggcagatccacccaaataacgggatatgatgtaccagctttatattttggacgttgaacaccaacaaactgcaccattttaacaagttcatcaatacgatgccacttaggtagatattccaccatatctgccccaataatgaaataataatcaacatctggatttttttcaattagaagcttcatcgtatcgtatgtatagctgatacctttacgttcaatttcaattggttcaatagataaaccatcaatgccttctattgctaattcaagcatcttgagacgatgctgttcatcaattgtctcttttttatcaatatgtggtggctgaaattcaggcatcaacagaacttggtctaaacacaattgctgacgtacttgatctgcaacaacaaggtgggcgttatgaacagggttaaaatttcctcccataattccaatttgttttcggttagtatctcgctttttctcttctaattcaacttttgtaaatggtgttagcaattcgagtgccataattcctccatgaacaagtagtatctctaaaaaaacaaacactgattatcatgatcagctatcatacggaagtgtaacttaggtaaatcgttttttagttctatactctatttcttaatctattgtagtttagtttgattttactgcttttactttaactgaaattttacgattttctttgcgcgctgactctttataaagaatcaagatacgtcctattttaaggacagtatcgcagccaatttcatcttccagaacttcagcgacatcgtggatatcttcatcggtattttgtaaaagggttactttgattagctcacgtgcatcgagtgcattacgtacgcttgttttgatttgatcatttaaaccatttttcccaatttgaataatgggtttcatagaatgtgcttctgattttaagaaagcacgttgtttagatgttaacatattagtttcctttttatctattataggattatgactgtatcatcagctaaattagatgaaaaaccgtcatatgttgctggttaatttagttattaaattaaagctttgcgtaaaacaactgccacgccttctggagcccaagcagctactactactggattttctgcttctgatttcacacgtatccaaccaagacccgaataaacaatatccattttatctttgattgtaaattcatgacgaactaatttaggaaaatctgaaacttccttacctgttggtggtgtcaataattttccaacatgtttagtgtaaaattcatctgctccaactagtttagtgcggtgtaaattcaggttattatcaaaatatgccgtaaaaccttgtttttgaccagaaataaaatcaaaacgtgctaggccagccaagaataatgtttgttctgaattaagctgataagttttgggttttatttcttttttaggactaacatatttaagattttttgctgtcaaataatgagccatttgatgacgatgaataatacccggggtatcaaaaatatagctaccatcatcaagaggtatttctattttatctaacgttgtacctgggaaacgtgaggtcgtaataacatcacgactaccagtaatttcacgaataatagcgttaataagagttgactttccaacattagtaaccccaacaacataaacatcttgaccatgacgatacttttcaatcgtatcaatcaaatccttaatagcatgatgattttgggcacttgtcaagatgacatcaacaggacgaagcccctcttcatgagctctctcagttaaccattgtgttacttttccatctttaaccgatttgggaagaatatcttttttatttcctactaaaagaacatcgtttcctgcaacgaaacgactaagaccaggaataattgaaccattgaaatcaaaaatatcaatgacattcaccacaagggcatcactatctccaacctcatgtagtaatttcaaaaattcatcatcagtgatatgaacgtcagtaatctcattatagtggcgcaatctgaaacaacgctgacagtataattctcctgtctctaaacctttttcaagtgctgcacgaggtgtatagccagcagcatctttattttcagtttgaatcctggctccgcagccaatacaaaataactcttccattaaattcctttttgatatacgattttaccgtaattctcttctatttttttccaaacgcgacgttcacgtaagcgattgaacttggtattccaagcatcagatttaacaattggttttaccaatacggactttattcctgcgcgatgactagcacgaatatctgtcatcaattgatctccaaccataatcacctcgtcacgatcaaagccataacgctcaattgccatgtttataccacgagtaaatggtttcatcgcacgacttacaaaatccacaccaaaacgtgatactgcacgttctacgcgagcatgattgttattagacactactacaactgaaatatccgctgttgtcatctcatctaaccatgcacgcacctcagcagtaccatctggattattccaagcaatgagtgtattatctaaatcaactaaaaccgcacgaatgccatgacgtaataaatcttctgctcttaaatcataaactgcctcaaccacgaaggtcggcctataatcatctatactcaatttcatctccaaaaaatatattttactattcattctaccataattcttaagagatagcgagtaaagaaaaaaggtctttaaagacctttaaattagggtttcaaccccaaaagatactatcttactcgtttcattttcttcaatgcaattaaatctttgtaagagattagagttacagcaagaaaaataaacagcatcccaagtaaatctattggataaaaaatttctcctaaaacaagtactgtcaaaaataccgaagaaactggctctaccgatgctaataagctacccttgacagcacctacaatactaacccctttaaggaaaaaagtgtaagcaaaaatagtcccaataccaataatgccaatataagcaagtatactcatcacattaatttgtaaggggtattgccacgcttttgtcaccaaactaaataaaatcccacctataaacattcctgaaccaataacaatcgtacttccccattcatgaataagtttcacaggtaataaaatataaatagaataagtaatggcggaaccaagcccccacattaatcctttcggtgtgatagctaaacttcctaacttcccatgcgttgcaatcatataggttcctaaaattgccatagcaattgctattatttcaaaagatgttggtctttgtctgtttaggatacaaacaatactcaaaataagtattggtgccatatattgcaaaaccgttgcagttccagcatttgttaaatgaatcgctctgagaaaagcatattgatttaaaactaaaccaaatatagaaaaaagtaaaacctgctttaaaaattttggctgtttccacgctgctactaaatgctccttttgttttgatctagctaaagacaagagaaagatacctgttatcaacaatcgtaaagaagtcaaaaggttaacgtgtactccgtgcgacatcaagtattgaccactaattccagaaatgccccatgctagtccggcagctaaggtcatcattgttcctttttcttttttagtcatttttcccctcatttttatttcttaaacactgtagttaaagtcatctgataaatatcttagcttcttaattatttatccctaggtgttcgtgctaaattagcgaataaaaaccagccaaaaggctgatttctattcttcttttaattttgctaattcttgcgctaacagcttcagagcaacttgtggattagcttgtccttttgttgctttcattagataacctgtgaaggccttatcagcattgcgttttcctgacttaaagtcaatcacagcagcttcattatctgcaaagacttgatgaataattgggattaatacttcaggatctgaaatttgaactaaaccagcctttttaacgaattcttcagctgaaccaccatttttagctaaatgcacaaaaacttttttagcaattttggatgaaattgtaccgtcagcaatcaagccaatcatctcaaccaaattctcaggagtcagaccaatttcttcgattgattttgattcactgttaagaaattgcgccacttctccttgtaaccaattggaaacttgttttgcatcacccccaatagcaacagctttttcaaagaaatcagaagttgcttttgtagctgttaattggctagcatcataagatgatagaccaaaagacgatacatatttcgcacgacgttcctgtggaaattctggtaattctaaacgaacttgatcaatccattcatccgagatatcaaatagtggtaaatctggttcagggaaatagcgataatctgatgagccttccttgacacgcatcaaaatagtctcacctgttgtttcatcaaaacgacgagtctcttgctgaatttgaccaccagatcgtaaaacttgtgcttgacgtttttcttcatgtatcaaacctttacgtacattattgaatgagttaaggttcttaagttctgctttagtaccaaactcttcttgaccataaggacgaagtgaaatattggcatctacacgcatagaaccttcttccattttaacgtcagaaattccagtatattggataatctctttgagagctgtcaaataagcataagcttcctcaggagaacgcatatcagcttctgatacaatttcaatcagtggaacaccttgtctattaaggtcaacataggaataaccatctgtcccatgtgtattttttcctgcatcttcttcgaggtgggcacgctcaatacgaattttttttcgtgtaccatcttctaattcgatttcaatccaaccattgtaaccaataggctcatcaaactgtgaaatttgataagctttaggattatctggatagaaataatttttacgatcaaaatgcatgttttgatggatatccatattcaaggcaagtgccgccttgattcctgcatcaataactcctttattcatgactggaaggacacctgggaaagaccagtcaattacatttgtattagcattttgttcctgaccaaaatgagcggaagaaggtgagaaaattttagagttcgtatttaattcaacatggacttcaagtccaatgactgtttcaaaattcattagttctcacctccaaaaattttaggttgttgtttatgataatctgtcgttgcttcgaaggcagcagcaacctgatatattgtttcttcactgaatttcggaccaatcaactgcataccaaccggtagaccttgatcaaaaccagcagggattgaaatacctggtaaaccagccaaattaactggtattgttagaatatcagctaggtacattgcaactggatcgtgatttaaagaatctaagtcaaaggctgttgttggagctgttggacctaaaatcaagtcataatctgcgaaaactttttcaaaatcttgaataatcaaactacgaacttgacctgcttttttataataagcatcgtaatacccagaagataaactgaacgttcccagcataatgcgacgcttaacttcgtctccaaaaccttcagatcgtgtattgacatagatatcatccaagtttttataattttctgtacggtatccataacgaataccatcaaaacgttgtaagtttgaagaagcttccgatgaagcaacaatataataaacagcaacaccgtatttagaatgcggtaaactaacttcctcaataactgcacctagtttttccagatgttttgcggccttaataatcgtttctttaactccttgcgctattccttctcccaaatattcttttggtaaagcaattttcattccttgaatatcttgaccaattttagcagtaaaatcgcctacagtacgctcagaagaagttgaatctcttacatcatgcccagaaataactgtcaaaagctgtgcattctcttttactgtttgagacatcggtccaatctggtcaagcgaactaccgaaagcaaacaaaccaaagcgtgatacacgtccgtaagttggcttcataccaacgattccattaaatgaagccggttggcgaattgaaccacctgtatcagagcccaatgataaacgtacttgtcctgaagctactgctgctgcagaaccacctgatgatcctcccggaactttactatggtcccaagcgttatttgtctttttaaaataagatgtttctgtagagcctcccatggcaaattcatccatgtttgctttaccaatcacaatcatatctttagcatataacttttcaacagccgtagcatcaaagattggctcatagttatagagcattttagaagcagctgttgtaagaatcccctttgttgaaatattatctttaactgctaagggaatacctgacataacattatcagcatcaattcctttatcatcaatttctttggcttgagctattgccatctcatcagaaatagtaataaaagatccaaccgcttgttcacgcgcatgaatatcttccaatgtagcttttgttaattcagttgctgaaatttcttttttaacgagaaaatcatgcaactgatcaattgattgattattaaacgacattaggcatctcctccatcctcaagaattgcaggtactttaatataataatcttgatgctgtggtacatttttaaataagtcatcacgattatggcctggttgagcaatatcttcacgcatcacggttttgcgatctgccatggtcgttgttactggtacgccttctgtgtcaacttcatttaagagttcaatcatatcaacaatctttgacaaacttgacgcaaattctttagtctcttgatcagaaaagcgcaattttgacagattggcaacatgacgcacttcttcttcagaaattttcatgagttctccttatctctgtatcattttcgttttaagatagtctctactattatagcatattaaactctcaatgttatcacattatcccagcttttcataataaacgcttcttacctatgataagaagcgtttactgtttatttatctattgttatatcatttctgctttgtttgattttagcctgtgcagccgctaatttagcaataggaatcctaaacggcgaacacgatacataatgtaaccccagttggtaacagaactcaatagatgatggttctccaccatgctctccacagatacctattttaaggtttggcttaacttcttttcctaacctcactgcctgcccaataaaccttcctattcctttttgatctaaaacttggaaagggtctttttttagaagtcctttatcaacgtattctcctaagaattttccagcatcatctcgtgaaaatccaaagctcatttgtgttaaatcattggtcccaaaactaaagaaatccgcaaactttgcaatatcatccgctatcatacaagctcttggtgtttcaatcattgtcccaatagggaatgataagttaatttttttagatttactctcctcaacaattgtctcttcaatcagatcacgtattatagagatttcttcatgcgctgtcactaaaggaatcataatttctggctttgcctcatatccctctttcattgcaagtatagcgccttgtacaagagctctcacctgcatttggtaaatttccggataggtaatcgcaagtctacaaccacgatgacctaacatagggttgaattcttctaatgtttgaatccgtttttcaatagctaaagtagatatccccatttgtcttgccatagattctatagactctttatcatggggtaagaattcatgtaaaggagggtcaagcaaacgaatcgtacaagctttacctttcaatactttaaaaatttgataaaaatcgtctctttggaaagataaaagcctttctagagccttccttcggctcaatatttcatccgctaaaatcatttctctaacgactggaatacgttcatcgtcaaaaaacatatgttccgtgcgacaaagacctattccttctgctccaaagtccaaggccttttgagcatctctcggattatctgcatttgaacacaccatcatatctcgattttcatctacccatttcataaatatctcaaaatcacgatctacgctagtctctgccatcggaacttgtcctatataaacatttcctgtagcaccatcgattgataacatctcaccttcttttatcgtttgatgcccaatagaaatttctcgtcttacttcatcaaccaataattgactacagcctgcaacgcatggtttccccattcctctggctactactgccgcatgggaagtcattccgcctcttgctgttataatcccgtttgcactaaccatcccctcgatatcttcaggtgatgtctcttgtctgaccaatagcactggatttccctttttcatctctttaacaacatcttctgcatggaaataaactttcccataagcagctccaggagaagctggaagtcctgtcgtcaaaataatagctttctttaaacttttcaagtcaaaagaagggtgtaataactgatctaattgtttgggctcgatacgtagtatagcttcttctttactaattaggccttcatttacttgatctactgctattttgatagctgccttcgctgtacgcttaccgcttctcgtctgaagcatataaagattaccattttcaattgtaaactccatatcttgcatatcgcgataatgagcttctaacttttgggtaacgcttacaaactcttggtaaataataggcatttgttctgccaattttgatatggattgtggtgttctgatacctgcaacaacatcttctccttgtgcattaatcaaatactcaccaaataaatttgctgctccagttgatgggtttcgtgtaaaagcaactcccgttccgctgttatttcccatattcccaaaaaccatagcttggatattaacggctgtcccaagcgtctccggaatatcatttaatttacgataaatcttagctcttggattattccatgatttaaaaactgcctcaattgctaacaaaagctgccttttaggatcttgcggaaatttttctcctgcttctttttgatatagttccttgtaaaattcaacaagtctctttaaatctgaaccagttagttctgtgtcatcttgataacatttatctgtcttaagtcgatctaaaatggtatcaaatttatattttggaatgcctgtaaccacatctgcaaacatttggataaaacgacgataactgtcataagcaaaacgctcgtcttctgtctttttcactaaaccttggacactacgatcatttaaccctaaatttaaaactgtgtccatcataccaggcattgaaaaaactgatcctgaccgaactgacaccaacaaaggatcatcaacacttcctaattgcttgttctgttcaacctccaattgtgccattgcttgatcaatttgactaagaatactctctcggatatggcaagcgttatcataataatcattacaagcctgtgttgtaatagtaaaaccttgtggtaccggtaacccaatactcgtcatttcagctagattagcccccttaccacctagcagttccttcatttccttacaaccttcatcaaaatgatacacaaacttagtttccatcagcgtctccttttacagatttttagctacttgtccatttgtttttaagatttctaaaataatcgttgctgtttcttcgattgctttatcagatacattaatgattgggcaacctaaatttttcataacttcttcagcatacctcgtctcctccaaaatccgttctaaactggcataatttgccgtactagaaagacctaaggactttaatcgaacttttcggacttgattaagatgatcaaccgaattagttagtccgataatccttctagaatcaatcatacgtaattctttaggaacaggaacctctggaaccaaaggaatattaataactttaatatttttatctgctaaaaacatacttaatggtgttttagaagttcttgaaattcctataataactaaatctgcttgtaaaatacctcgcggatctctcccatcatcatattttactgcaaattctattgattctactcttttgaaataatcattgtctaagcgtcgtaaaatccctggttctcccaaaggatctatacccgatatccttgatattccttgaataacatttgttaataagtcaacataagcataatgttcactttcacatcgtttctgtgcataggaagccaaagcaacatcaactaaactaaacatcataaatactgtcttctggctagcctcttcaaaaacttgttctaagcgttcctgactgttaatataggaaaaacgttgaaaatgccaatcatcatgtcctggaaattgtgacaaacatgctttcgcaatagctttggctgtttcccctaaagaatctgaaataataaatatagtgagttgatcttccatcagtttcctcctaataatctcttatttctaaaaacaaactagcgaggattgttttagataatttcccgatcactttaaatttttcgggatattgcttatcatgacgaacgacagggagactatccacttttctgctcactaatttatcagctgccgcaaaaagactttcattttctaaaacagttgtcacgtgtggcatacgtgtcatcaccattcctattggcattttagaaagatctcctccgccaatactgatttttagtaaatctttacgtgacacgactccacagagaaaatcatcatcatccaagataaaagcacaaccagcatcttccataaaaatatgtacaataacatcataaactgaatctttttgatgaactgtcagagggatccccataatttctgaaactgtcatcttttcaaaatgacttgtccctattgaagcatgatactgtcctaaataaaaataaccaaccttaggttttgcatctatgatacctagcatacttaaaaccgccaaatcagaccttagtgctgctcttgttactcctaatttctcagctattagctcaccagtaatgggctgaaactgtttgataatatcaataattctttcttgcctttgatttaattgaataagatcaccttctttatatattgtatactatttattttatatgttatattatatatctttttttactgaaatcaagtaaaaaaagatactattttaaaaataatcatactatatatttgcttttagacatatcttttgttaaactttcttcgaaaacgttttcgaatataagtatcggaggttgtaatatgacaattaaaaatctcactgttgcaggaagtggcgttctaggtagtcaaatcgcctttcaagcagcttacaaaggaatgtctgtcaccatatatgacattaacgatgaagctttaaataagggaaaagaacgcatcaaaaaattagctaaagtctatcaatcagaaattgaaacagcaaaagaagcatatagtgataaagctaaaagtatcaagtataataaaaacttattgcctagcttagaccatatttttctttcaaaagttgccgattcattagacttgattgctgatttaccaaaccaaattactttttcaaaaaacttagaccaagctgtaagtgacgccgatttagtaatcgaagctgtcccagaaacagttagtataaaagaagatttttataaacaattagctaaagtggcaccttcaaagacaatctttgcaacaaattcttcaacacttgttccaagtcagtttgctgatataacaggacggcctgacaaatttttagcaatgcatttcgctaacaatatttggcaaaataatattgttgaaattatgggacataagggaactgacgacgaggttatcaaagaagctttggcattctcaaaagatattggtatggtgcctttacatattcataaagaacaacctggctatattcttaattcaatactagttccattcttagagagtgcactagcattgtactatgataaggtttctgattctgaaactattgataaaacctggaagttaggaacaggagcaccgatgggacctttagaaattttagatattattggcatcgataccgcttataatatcatgaagaattattcagataccaacagcgatcctaatagtcttcatgctcaccttgcaaaaatgcttaaagaagaattcattgataaaggacgtaccggtaaagctgctggacacggcttttatgattacgactaaactataaaagaggttagataaaaatctaacctcttttataattcaactaaagaatagttgcaccaagaacagttttaaaatgatttaaagcccattgatgattactatcatttaagctagctacagctgctgctgggacctcaattttataacctaagttataagcatcaattgctgtgtgtaatacacaaatatctgtcaatactcctgtcaatatcaaagtatctactcgtctttcacgtaggcgaatatctaaatcagtgccagaaaaggcagaataatgacgcttatctatccaaaaaacacgactatcttccttaatagtttcatatagagttcccaaaggaccatataggtttctaccagaagtccctttaatattatgctcaggaaaaagattgctctctggatgaaaaacatctccaatatcatgattatcaatcgcaaaaaaaatataatcccctgaccggtatgctttctctgtaacgtcagctatagctgaagcgatagattgcgctggtttacctgccgttaatttcccatcatctgccacaaaatcatatgtgtagtctattgagatgagtgcttttgtcatttttcttcttatctcctcttgatttcaaaaaaggaactgaaagctactcccagtcccatgctatgattaattatattcttttaatttgtcaaaaataccttcgttaataactttgaggtatgttcccttcataccgagtgagcggctctcaatgattcccgcagactccaatttacgaagagcatttacaataacggaacgtgtaattccaatacggtctgcaataacagatgccgttaggcgtccttcaagtccatctaattctcctaagatagcagctacagctttcatttctgaataagatagagtgttgatagccattgtcaccgctgtttgtttacgaatattttcttctagattttctgtttgaaggttaagtaattgaataccaacaacggtgcttgcaatttcaactaaaatcaaatcatcgtcgctaaattctttatcattacgccagataataaatgttcccaagcgcattccaccaccataaattggagcgattgttgtaataccatcttggaagttttcctttgtctcaactgggaaaattgacaaatcattatctactgataagttagcttctgtatcataaacacgactagcagatttaacatagtaatctgggaattgttttgtttcaaaaaattcttccacacggtcagtgtttgttttatatttcatggcatagccaagtaagttaccaccaccattaataatacatgcgttacagtcaataatatcagctaattgagccgccattgtattatatggtagttcggcatctaagctatctacggaacgctgtaagatggatgtaatttttctagttttttctaataaattcggcatttccttcatcctttgtatgttttgcgttacaattatatcaaagcattttagcttttgcaaatcgatatcagtacattttaagaacttctattgttaatttaatgtttatctaataaaaattcattctagcgcttgtattggcttaaaaagcgagccattttttcttgtagttcagtcaattcatcaacacgtggtaagtaaacaattctaaaatggtcagcggtattcatattaaatcctctaccgtgtgttagtaatactttttcttgttttaagaaattaagcacaaactcttcatcattatcaatacggtacatatctgtatcaattttagggaaaagatacagtccagcatttggttttacagcagataaaccaggtatttcattaattgctttatggatataattacgttgctcgtagatacgacctcctggcaacaacatactatcaatagattgctgtccgcctaacgatgtttgaataacctgttgagcaagaacatttgaacacagcctcatgttagctaacatattcaaaccttcaatataacctttaacatgttgtcgcggaccagacaataccatccaaccaacgcggaaaccacagatgcgatgtgatttagataagccagataaagtaactgtaaaaatatcctctgcaatagaagcaattgggatatgctccattccatccataactaaacggtcataaacctcgtctgaaaaaataatcaagtcattttgtctagcgatatccacaatctcttgcagaatttcacgcggatagactgctccagttggattatttggattaatgaggacaattgcttttgttttggatgtgatttttgatttgatatcatcaatatcaggataccaattagcttcctcatcacaaatataatgcacagcatttccaccagcaaggctaacacaagctgtccataacgggtaatctggcattggaactagaacctcgtcatcattatcaagcaaagcttgcattgacatagagattccctcactaacaccattaacaatgtatatatcatccatgtcaacatggatgttttgtaactggtaatactgcataacagccttacgagctgaaaaaatacctttcgaatcagagtaaccttctgattcacgcgcattcgtaattaaatcacgaatgacttcatctggcgcttcgaagccaaaggcagctggatttccagtatttaaccgcaatatcttttcaccatttgccctcatgcggtccgcctcttctaaaacagggcctctaatatcataagctacatgttccagcttcattgatttatcaaatatcttcataaaaatacctcgtatcttccattataaaacaaatattctcaaaattgaaacttttactgcggtttatcaagcgattaagttaatattaagctatttcagaaaactaacataaaacgctttcatttttctagaaaaaacgttataatatagctataaaatgaataaccaacatatctaacttactcatcactcactccttctgataagatggctagttgagtgcaagaggttatctcttttggttatatttagaggaggacaggcttatgtcacaaaaatatgaacgcatccttgtcgctattgatggatcaacagaatctgaacttgcttttgaaaaggcagttaacgttgctcttcgcaatgattctgaattaatcttgacacatgttatagatacacgtgctttacaaagctttgcgacatttgatacttatatctatgaaaaattagaaaaagaagcaaaagatgtccttgaggaatatgaaaaacaagctcgtgaaaaaggagcagataaagttagacaagtcattgaatttggtaatcccaaaacattacttgcacatgatattccagaaaaagaaaaagtagacttgattatggttggtgcaacaggtcttaatacctttgaacgtttcctatcggatcttcctcagaatacatccttcgtcacgctaaagtagatttactcattgtacgtgaccctaataaaacaatgtaaatttaaatacgctcactttctaaaatatcctgagttatattaactcaggatatttttattttcgatttaaggatttctgaatttggctatctaattcacgtcgaattgatggctcaggagcgaaatgttcttcccagtcgtctggttttaaaattttatgagtaacaggatcaaaatgagctttgccatctggaaagattttccccatattggcctcatgtactgtatcaaaaagaggttttgggtcgactcccataagaacaaaggagccataagtcagataaagtaaatctgttaaggcatccacttctcccactaatggtgtttctggatggtctttagaaataaccttatctcttgctttatcaatagctaagtgtaaattacggatagattggtcaaatactttttggttaccttgactagcagcatacaagaactcaacgatttcttctactttaaagtctgacctgaaaccagcttccttactgtcatataagcgtggcgtttcaatagtttcaccatccattaatagatggaaggattttactttattgaaattctcgtcacgactactgaatgttttttcaatctcaaattggataagtccataatgggctaatgccttagagataccatcatcattattgtcagcagttgtataacgtgcattttctctcacttgctgactagcgttccccatggcaacaccaatgccaacttgagataacatctcaatatcattatcagaatctccaaatgctatcacttcggatagatcaaaaccatagcgttgaccaacacgttcaattcccttaacttttgactgcccttcagaaatgacatccattgagtaaggactgcttcttgttaatttaacacgaggaaattgtttttgaattcgctctgattcgccctctgttgcaactaaaacgacctgataaataggttctcgtaagataaccatgaggctatcaatattttgaggtttaatccgacgaataaaatgcttaaagcttcgttcaatcgcttttgcccattttctcggaacaaggctagatacaatctgccccaaacggctagttcctagaccaataatacctgaaccgagtaatcctgaggctgttcctaatgaaatttctcttcttcttgctccagcataacgaatcagacgatagacagttgtcttagataattgattggtataaataatttcacttctactatagatatattgaccattataggttacagcaaaatctaaaccaaggttttctaaaaaaggttgtacaaaactaggacctcgccccgttgctaaaccgactagtattccttggtctttcaaatttcgaattgctttaattgttgacttttgtacattcttacgatcattaagaagtgtaccatcaatatcaaaaaatactgccttaattgccactgggtcaacatcccctcttttttatgataaaataaattatatcacaacttgaaagaagtataaaatcaatgaaaaaaatccttgttctacacacaggtggaacgatttccatgaatgctaacgagaagggacaggtcatgtccagcgccgataacccaatgaaatacgttgatttatcattagatgaccttgatttgactgttgtagattttctaaatcttcccagtcctcaaatcacccctcatcatatgcttgatatctatcactatctgaagcaacatgccagtaattttgatggtgttgtcattacgcatgggactgacactttagaagaaacagcatattttttagacacaatgatactccctaaaatcccaatcatcattaccggtgctatgagaagcacaaatgaacttggtagcgatggcgtttataattacctatcagccctccgtgtcgctaatagtactaaagctgccgacaagggggtgctagttgtcatgaatgatgagatacatgctgctaaatatgtcacaaaaacacatacaacaaacgtttcgacattccaaacccctacacatggcccccttgggattattatgaaacaagacctgcttttctttaaagcaactgaagagagagttcgttttgatttagataaaattacaggaactgttcctatcgtgaaagcatatgctggcatgggtgatagtggtatcattagctttttaaattctcaaaatattagcggattagttattgaagcactcggtgcagggaatatgcccccaaaagctgcacaagaaatcgaagaattaattgagcaaggtgtccctgttgttctagtgtctcgctgttttaatggtattgctgagccagtttacggatatgaaggtggcggagcaaaattacaagaatctggtgtcatgtttgttaaagaactaaacgctcccaaagccagactcaaattactcattgcactcaatgcaggtctcacagggcaaaatctaaaagactatattgaaggttgataaaaaactctagaaatatttctagagttttttattaattttcagtttgtaatactctctcaacactgctaataggcatttcttgattcgttattaattgaaatgcttctgctccttgataaatcagcatccctagaccattataagcatgtttcactccattttgtctaacaaatcgtaacaatgctgtttctttaggcttgtaaaccaagtcgacaactactaaattcggtgttaaaatttctggatcgttaattaaactataattatctaatggcctcattcctaaactagtagcatcaatataaaaatgactagttctaatagcgtctttaaatgctgtcttattttctagataatcaacgactacctttatttgaaactgttttttaattttatctgataagtcaatgaccttatcgtaatttgagctgttacgattaaataatctaatttccgcaactccctccatagctgcttgaactgcaactgctttacctgaaccaccaataccagctattgtaattattttatttttagcactgaaaccttgagctgctaaagctttaaaacaaccaatgccatctgtcatatggcctactaaacgtccggttccaccttgattaacgatagtatttacagcacccactaatttagcttgaggagataaatcatctagcaaagggataacactctgtttaaatggcattgaaacattaacaccacgaatacccaatgccctgacacctcgaacagcttctgttaatttaccctcttctacttcaaatgtcagataggcataattcatgtttttttcttgaaaagaggtattccacattaacggggatagagagtggcgtgcaggattggcaattagaccagttagtaaagtttccccatttaatgaattcattgtataaccttctttcttaacaatttatttcagttcattttaccaaaaactgactcaattaaaaagagagtatgtaatttatactctctcccttagtttaaggcaatatattacctgcactacggtaaatatcataccattctttacgggttaaagcgatatcattagccttatcaatcgcctttaaacgagatggattcattgaaccaacaatcgcctgcattttggcaggatgacgtaaaatccatgcaatcacaatagcttcgctgctaacattgtagttttttgccagtttagctatggtttcatttaattccttataatccggatgattaacaaataaaccacgagataaatcaatttgaaatggagaccaagcttgaatggtaactcttttaagacgacaataatcaacaatgccatcatcatgttcaattgaagctttatttaacatgttaacatttaaccctgcatcaaacattggtgtatgtgctggcgataactgaagttgattcactgctaagggctcgtcaaggtaggattgtaacaactccatttgaaaccggttttgattgctaacaccaaagtgttttactttaccttctgccctcagtttggtaaatgcttctgctacttcttcaggctcaactaatacatctggacgatgaagaatgagaaaatctaaatattctgtccctaatctttctaaaataccatctactgatgataaaatatactctttagaaaaatcaaagtaaccttctcgtatcccacatttagattgaataatcattttgtcacgattgacatttaaatgtttgattgcatctcgaaagcgtaattcagatagccctcccccataaatatcagcatgatcaaaaaaattaatacccaaatctaatgctgttccaactacttcttcagcttgttttcctttcaagtcactcattctcatacaacctaaagcaattcgagttgcttgaatgcctgtttgtccaatgttttgtaacatatgcaccccattctaatctgtttgtattaacagaaagattaatcaattcattataacaaaatttctatgaaaaggcttactattacaaatgcaaaaagctgagtaaatttaactcaactttttttctgatactcattattgactaaataagtcggtaagaaaaatctattctgaaaagtactattataaattacagtaatcattattgtcataacatacctccacatctgtgataggaatatcatatgacagcaagcttaaactgagcttagcacagccttaatagaaacttaatcaaaatctgaatgttggcgtaaattatctagaataagtgcccattctgtattttctttccaattattatctttgacaatatcactagcaacacgtctggcttcttctaaaataggataatcctcaacgatatcagctacttgaaattctggaattccagactgacgagtaccaaagatttcaccagaaccacgcatttttaaatccgactcagctaaaacgaaaccatctgtcgtttctgtcatgattgtcattcgttttttcccagaatcagttttgggattagccactaaaacagcgtatgattgtttatatccacgaccaacacgcccacgaagttgatgtagctggcttaatccaaaacgatcggcatccataataatcatgatcgttgcatttgggacatttacccctacttcaataactgttgtagatactaaaatatgactttttttatccttgaaatcttgcattatagcatctttttcatcatttttcatacgtccatgtacaagagcaaccttagcaattccttcaaaataagtagataattcagcatgcaatgctactgcattctttaaatctaaagcttctgactcttcaatcaacggtgaaatgacatacacttgagcatctttttgcaattcaccttttacccattccaacacagtacctagctgctcgtgtttcacccagcgtgtaataataggtttacgaccggcaggtaattcatcaataatagaaacatccatttctccaaaagctgtgattgctagagttcggggaattggggtggctgtcatcattaaaacatcaggattttctcccttttcacggaaaattctacgctgtttaacaccaaaacgatgttgctcgtctgtaattacaagccccagtttatggtactgtaccgagtcctggataagagcatgagttcctacaatcatatcaaccgagccatttgcaatagctgctaaaaccgtacgcttaacagctgctttcatacccgaagttaatatagcgattgataaatctggaaataactcttgcagactaatgtagtgttgttcagctaggatttccgttggaaccatcaaagccgattgaaaacctgctgtataagctgcatacattgatagaccagcaatgactgtctttcctgatcctacatctccttgcaataaacgattcatatgagctcccgatgacatatcagataatatttcatctaaagagcgcttttgagcattcgttagaataaaaggtaaagaggaaatttttgtctccatagcatgtttactataaagaataggcaaaccatttgtttcagatttattttcggatttcaaaacttgaaggttcatttgaaagtaaaataattcttcaaatttaatccgacggagcgcttgcttatactctgtgatatcttttgggaaatgcatagctaaacaagcctgactacgacccatcaatcggtatttttccaataaagtagctggtaaattttccttcaattccaaatgcgcactgatttcaaaagctgacttaatagctttaatcaaagtagactgtgaaattccctgagctacgcgataaacaggttgcatgtcatcttcaacttgagctaaaaccttcatcccagtaatagctgatttagttgcatcccatttaccaaagacagctacctcttgaccaagttctattttatcagctaaatagggttgattaaaaaaactaacatttaagacagcttccccttgacgcaacttaaaacttaaacggttacgtttaaaaccataatattgtacattagctggagtaacgactaggcctgtaatgactgctttttcaccatccactaaatcaaaaacagattttgatttaaaatcttcatagcgaaacggataataaagaagtaaatcttctactgtataaatatctaatttctgaaatttttctgctgattttggtccaaatcccttaagattagaaattggtgattgtaatagcataagattctccttctaatatcttttattatactaaaagatcaccaaaaaggcgcctcaagagcgcctttattatgtctaattatttatggccaataacataagttaattgtgcagcttgtgctgaactaaaagtacggtaagagacaataccacgtcccattgcattagattctgaaataagaactgaaccatcttttttaacttcttcaacaatagctacgtgaccgtaagtgccatcagcaccagcttgtcctggtgaaaatgatacagcatagcctacttttggtgaatgtgttgtttcaaaaccagccttatgttgccaatctccaccattacccataaatggatcaaatgtataacctaactctttagcgcggttaaagacataccatgtacattcaccccatggataagttgatgcaatatagctagctgtgttaactgctgttgataagctaaaaccacttggtaaatctgctaaacttgctgtcgataaagctttcaaggcagcaggaatttctggtgtccctccatgttgatcaatccagcggtctaaatcttccataatctgggcacgacgtttaccagttccagagttatctgtataataaacaccaccctcagtaactgtattaagttgtccagaagataatttctgtgctttcaaatcttggatttcaaagctagagttgttgtttttaataattgtattttttgtcaacaacataattgcttcttcatcattataagcactagcatggctagagtcatgatcaaaggcaccataaccaaacatattagcacctggcatcttagccactccttgagttcccaatgaactttcaaggacagcaatagctacaatagcacggacatctaaaccactatctttttcccattgtaataacttagcaccattgatacgattagaatcatattgaatccctaaagattttaagtacccatctaattgttcagctttgataccgtaacgatgtgacaataaatagtgagagtaggcatcctgaccagaccagtgttctacgtagaatggcgttgctgtcactggtgaaatcggtgttgataataagttatcatcaaaggataaagcaggaacagaagcattctgatttgtctgaacactttctatctgagacggagcgggagttattttaggctctactaatggtaaggtaggctcaggttttaattcagtctttgttgattgacctggcttactgtctgcttgactactgtttgtagtattagtgctaggagtagatgctgttgaagcagaatcagatgttttagcatcttcgttggaagaagattgatgtgatgaacttgatgatgattcattgcttgatgatgtctctgtcgtaccaatctctgttttttctgttgagatacttccttcggctgaaggtgaagcagtttctgaatctgtaggttgtgttttttcctgtttctctgcttcagaagaactttctgttgatgctgttgccattgtcaggcttgtttctggattaatagtttctgctaaggtcactaaaggtgatgatagcgataagactaaagtggataacaacaaagttgccattactttttgttttgacatatactaatgatttccttctataaaaattgtcactgattagtttaacatatttttaaattttttaaaacagttaactactgtgtcatttgtttttaataatatctcggaatacgatcgcttaaaagacaaagtacttcataattaatcgtctgtcttttttgagcgacgtccgtagttgtaatgttacaactaccttgttgaccaatcaaggttactttagttccgatagtatatttttgaggtaaacggatagtcatttgatccatcgagacacgcccaataatttcacaaagttctccatttactataactgaaaatccttgcatatctcgtgtccatccatcagcgtagccaatcggtactgttccaacaaattcgtctccagtaacttgataggttgcgccatagccaacttgagaaccatcgtgtagttgtttaacatgtactagctcagactctaaacttaaagcagggtttatagggtaaggtaagtctaaatcagttccacttggatttaagccgtacataacaacacccaatctaacggcattaaaaattgtctcactatgccaaaggcttgtagcagaattactagcatgaacaaggtccggacaattatctaatcctgaaataaagtctttaaaaaaagtaagttgttgattgaatttacagttatcggcttcatcagctgttgcaaaatgggtgaaaatccccttgacagaggcaccactttcccccaattcagaaattagcttatttccttcatctaactggcgaacacctatacgtcccattccactatcaactttgatatgtacttctagaccagataaatctactgctgatgtctgacataaacgtaaccactccaagctagcaactgttagagtaatattttcatttttggctagtataacctgctcaggcataacaacacctaataccaatatcatttttacaattcctgcttgacgtagctcaatagcctcatctaaattggatacgcaaaaaccatctacaatagactcaatgtattttgaaacttcaacagcaccatgcccataagcattagccttaactacagcaaatgtttttttatcacttggaatgtgctcttgtacagatttaacgttatttgcaatcgcctctaaatctatcaaggctctggttggtctatgataacttgaaatcatttttcttcctccaaaataacactagcttgtgcataattaccactatgagatattgaaacaaaagattttccattaaacggttcttttgtaatcaaaggcgctcctttatcatccgataaaatttcgatatcatgaaaattaactttcccaattcctgttccaagtgctttgctataagcctcttttgctgcccatcgccctgttaaaaaagacatctgacgcttgggattggaaattcctttaaaaagaagcaattcttgttcggtcaaaacgcgttctgcaaaacgttgattacgctcatatgctttagtaatcgcctctatctcttgtaaatcaattccgtgtccaacaatcatgtgtaactcctataagttcgatacttacaaactattgtaaatatccctaattagcatttctgttttatcccaacctagacatggatctgtgatagacttaccaaaaacatctggtttatcttgtcttccatcttctaaataagattctatcaaaaaaccacgaacatagtttctaattttagtatgccactgtcggtctgcaagtactgatttcacaatgcgaatttgttctaaaaattgcttacctgaattgtcatgatttgtatcaacaacaataaagggattttgcaaatcagtctcttcataatgagtaatagtttctaaaaggttttcataatgataattagggatacttcgatagtcggcattatgatatcctctcaaaataacatgtgacagcaaattaccatctgttctaacttgcttattttgatagaataattcctgttgattttgtgctgcatagaccgcattaaacatgactcttaaattaccagacgttggatttttcatacctactggtgcatctatacctgaagatataaaacggtgtccctgatcttccactgaacgcgcaccaatagcatagtaagaaactaaatcatccatcactgataacatctctggataaagtaattcatcagctgtcaggagtccagtctctcgaatgatgtcatagtgcatcttacgtgcttgaaaaaaaactcctagtttgtcagaatggtgaactaagcctttataaccatcaccattcgttcttggcttagcggtataaactctcataaccaaaaacattttatctttaaaggcagcttccaatttagctaaacgctttgcataagttagcaccgcctttggattatccgcagaacaaggacctactattactagaaaccgctgatcctcaccttttatgatattttttaactcttcttctttggctaattttttttggctaacttctagatctaagctagttttctgcttcaatatttcaatattaattttatcacttaactgatgaaatcccatgttttttcctaatacaacctaagtctattaataagctctgctatacaatatagtcgtcatactattagacaagtaatgataaaacagtcttctcagactgttttatttttattttaaaatcattgttattgtaaacatctcagaccatgacaatttttaaacttcatgccagagccacaaggacatttatcattacgtttaatcccttggtattctggtgattcattattcataggtacatgttgtgccgagatattttgctctgctgttgtcgtagcatgttgagaagcacgttcacgctcttgttcatgaatttgagctttcatcaatgtacgtgtcacatcaaactcaatcgaaccaatcatatcttggaacatacggaaaccttctgattgatactcaacgattgggttattttgagcataaccacgaagtccaacggagttacgtaattgatctaaggcatcaatatgctctgtccattgattatccactaccatcaagattaagactttttggaattcgataatagcttctggatcttttaatttagcaatttgttgctcataaacagctaaggcacgttcataaagaagttctttaatttcagcctcttttagaccacgaagttctgaaactgtgatagcttcttcatctaataacgccgatcttgcaaaattaacaatagcttctgctgcagtatttttatcgcttctgctatgtgcatcaactgctcttttaatcgtacgtttaatcatccctttgagctctggtcctaaatcacgctcagcagtaatcacttctctacggttagcataaataatctcacgttgttcacgcataacatcatcgtattgcaagacttgtttacgtgtgtcatagttattaccttcaacgcggcgttgagctgattcaacttgtcgtgtcaacatttttgatttaataactgtatcatcttcagctaaattcattcgctcaagaaccactttaatacgatctgtaccaaagcgacgcatcaaatcatcttctaacgaaagatagaattgtgattcacctggatctccttgacgacccgaacgaccacgaagctggttatcaatacgacggctttcatgacgctctgtaccaataacacataaaccaccaagttcacgaaccccttcaccaagcttgatatcagtaccacgaccagccatgttggttgcgattgtaacagcaccacgttgcccagcattcataatgatttgagcttctttaaagtgatttttagcattcaaaacttcatgtggtactccagcagcaactaattttctagaaattaagtctgacgtttcaacagctactgtaccaaccagtacaggttgtccttgttcataacgttctttgacatctgctaccaccgctctaaatttagagtcaagagttggataaagtagatctgaatgatctatacgttgaacaggacgatttgttgggataggaataacgcgcatattataaatttcacgaaactcttcttcctcagtcttaccagtaccagtcattcctgctaatttatggtacatacggaacatattttggtaagtaattgaagcgctcgtttttgattcttcttggattggcactgactcttttgcttcaatagcttggtgtaagccatctgagaaacgacgtccttccatcgtacgaccggtaaattggtccacaattaaaatctcttgttcttcactaaccacataatcaatatttaacaacataatatagttagctcgaagagcgttatcaatgtagtgagttaaggcaacattttcgagatcatacaagttatttagatggaaatagttttcagccttgtcaatacctgtatctgataaaccaattgtttttgttggaacatcaatgatataatcatcgctattaagcgtttttacaaacatgtccgcacgtgtatacagttggttcatctcagagcttacaggacctgaaacaatcaatggcgtcctagcttcatcgattaatacagagtcaacctcatcaaccaaagcatagttgagtgggcgttgcaccatatcttcttggcgaacaaccatattgtctcgaaggtagtcaaatccgacttctgcgttagttgagtatgtgatatcacaattgtaagcttcgcgtttttcaaatggtgacttagctgctaagttaatccctacagataatccaagccaactataaacctcacccatttcggtcgcatcacgtgttgataaatactcattaacagtaataacatgaacacctaatcctgagatagcatttagataaacaggcattgtcgctgttaaagtttttccctcaccagtacgcatttctggaatatcaccatggtgaagaacgataccacccataatttggacgtggtatgggtataaacctaatacacgtttagaagcttcacgaactaccgcaaacgcttccggtaacaattgatctaaagtttcaccattttgataacgttctttaaattctggagtttttgcttgtaaagcttcatctgataacgcagccatatgatctgcgtaagagtcaactttcttagctattttatctaatttttttaattcacccttgtcattttcaataacagtgcgtagaatatttgccattctaattcctttcgatactcttatcaccacattttaccataaataatgttgtctttcaataaatggtcgttttaatcgagattaaaaagagtggtatccccactctcattattttttaacatgacttgctataatttctaactgtccatcaatatcccatttgacaacatcatttggcaagataaagtggtcaccttttttaagtgtataaactttgttatctactgtaatgtgacccgctccgtctaagacactaaccaaaaggtagggtgcaaattgtttaaagttggtaacaccagaaatttcccatttataaactgtaaagaaatcatttgaaactaataaagttgaagatagatgttttaacttcatattggcaggaacagtattggcaggtttaccaatcgtgagaacatctattgattgttcaatgtgtaaatcacgtaattttcctgaagcatctggacgatcaaaatcataaacacgataagtagtatcactagattgctgtgtttctaaaattaatatccctttacctatagcatgcattgtcccacttggaacgtagtaaaaatcccctgatttaacaggaattcgggttaaaagatgttcccaatctccagattcaatcatttggcgaagttcttctttagttttagcattatgaccatagataatttcagatccttcatcagcagaaataatataccaacattctgttttaccaagttcaccttcatgtttaagagcataagcatcatccggatgaacctgtacactaagccagtcattagcatctaagattttagttagtaaaggaaagacagtatcatcagggttgccaaataagcttttttcaccttgatacagcttatctaaaaaacaacctttaaagcgaccattcttaactcttgagacaccgttaggatgagctgaaatagcccaatattctcctgttgtttcacttggaatatcatagccaaattcatcccttaactttgttccaccccagattttatcgtgcatgcttgcttctaaaaataatggttccgacataagaatcccctatcttttgtaaaattcaagcctattatagcattttatccatcatatcgcttactttttttaatcttttatttgctaactaaactaagtagtggcttaagggttttattaaccttttgatattttctttgctaaagcaaaatttcctaacgttgcagaaccattttcttctatagctggtgtcacaatataatcagacaaatcgggaactggtaaatacccatttaataaagttgcaaatgtctggcgaacacgtcttaacatgtgctcttgtgccatgacgcctccaccaaatacaatgacttgtggacgatataatacagttgcttgtattgcagcctgagcaatataataggcttgaacatcccaaaccattgaattttcttcaatcaattcaccacgaataccagtcctagcttctagagttggaccagatgccaaaccttctaaacagctattatgaaacggacagatacctttaaaatcatttgcttggtcctgcggatgcatcgccatataagtatgacctgcttcagtatgaccagttcctcctataaattcacccttttgtatagctcctgcaccaattcccgtaccaatggtgtaataaacaagtgaatcaatattgttacgagctataacttcaccataggcagagctattaacatctgttgtgaaataaaatggaacattgaaatctttagaaattaagccgagtaaatcaacattagcccaatgcaactttggggtcgttgtgatataaccgtatgtctttgattttttatcaatatcaatgggaccaaaagaaccaatagcaactgcctctaacttcttttcaaatcttttaaagaaatcaacagtctttttaatcgtttcttgaggcgtcgttgttggaaattgcattttttctacaacttttaattcctcatcaccaactgcacaaacaaactttgtcccacctgcttcaatactaccatataactttgtcatcttttttcctatctataatctctatctcaaagacaaaggttgggataattatcccaacctttaatcctcacttaacatcaataatcatgtcacctgtagtaacaacaccctcttttaccaatggtacaacatcagcaaaatcagctgtattagtcacaataatcatagctgtattatccagacctgcttctgcaatcttggctgaatcaaaggtgccaagaatatcaccttttttcactttttggtctgccttgactttagaagtaaaccctgtgccattcatggtgacagtatcaatacctatatgaatcaaaatttctgcacctttatctgatttgataccgtaagcatgacctgtttcaaaagcaatttggacaaaaccatcaacaggtgagtaaattgtattacctcttggtttaatagcaaggccatctcccataatacctgatgaaaaaactgggtcacttactgtatcaagagcaataacctgtccatcaagagggctaacaatcgtttctgcccttaattggctagtttgagtaattgttggatcgtcatctgtttcttcaaccaaaggactaacttcagctactgctttttcatctttatcttcatatccaaacatataagttaatacaaaagccaaagacgtagttccaattaccataataaggtacttaacaatttgaccatttaaataaagtaatgttcctgggataatggtaataccaaaaccagttcctgctaatttcaatattgaagctaaccagccacctgctgctcctgcaattaatcccataataaatggcttaccaaaacgtaagtttactccaaatatagccggttctgtaataccaagtccagctgaaagcgctgccggaaaagcaagggcttttaattttttattttttgttttaacaccaactgccaaagtggcacctgcttgtgctgtcatagcagctgtaataatagcattaaatggatctttcccatcagcagcaattaactgagcttcaagtaaattaaagatatgatgaacacctgtaacaacgattatctgatgaacaccacctaaaataagacctgacaggccaagaggtaaattaaggacaaattttgtccctgctaaaacatagttttcaactgaatggaaaataggaccaatgacaaaaagtgctaaaattgacataactgtaaaagttaggaacggcactaatagtaaatcaagaacatctgggattttcttatgcaaccatttttcaagtttagcaccaagtaaacctacaaagaatgccggcaatactgaattttgataaccaactactggaataaaaccgaaaaattttatgggatgggcatcacctgaggccactgcccaagcgtttggaagggcagagttgaccatcatcaatcctaatacgagaccgataacaggatttccaccaaaaactctaaaagctgaccaagaaatcaaggcaggaaaaaaagcaaaggccgtgtcagtcaaaacgacagtataggtataaaaattagaacttgaaaatgcttttgaagtcgtcccaaataaagctaaaactgtatcattattaatcgcaccgcgaatccccataaataaaccagtagcaacaatggctggcaacaatggaacaaaaacatcaccgaaagtacgaatagctcgttggaaagcattcccttgtttagctgcttctgccttttgatcagaggttgacgaagttggcaaaccttgagccactacttcatcataaatcttattaacagtaccagttccaaaaataatttgatattgacctgaattgaaaaatgctccctgaactttttcgatattttcaacagtatttttatcaatgactgtctcatcttttaccataacgcgaagacgagtggcacagtgtgctacgctacgcacattactagcaccaccaatcgcattaatgacttgtttagcaatttctgtatttgaagccatctataaatctcctttgatattttgaaagcgtttcattttatttactctaatattctagcacgtctcataaatatatgtcaagcgtttgacataaaataatatttttcgatataaagtgttgatttcaaaagagaaaacgtttactatatagttattagatattaagacagtcaaggagtatcaaatgaatttacccactgaaatccgctatcgtccttatgatgaatggactgaagaagataaggaaaatattgtaaagaatgtctcaaaatccccttggagagcaacttatcacttagaagctaaaacagggcttttaaatgacccaaatggcttctcttactttaatggaaaattccatcttttttaccaaaattggccctttggagctgcacatggtttaaaacaatgggtacatacagaatcagatgatttagttcatttcaaagaaacaggaatcaagcttaaacctgaccatgtcaatgatagccatggtgcatactccggttctgcattagccattgacgataagctttttcttttttatactggtaatgtccgtgacatgaaatggaaccgtgacccccgccaaattggagcatggatgacaaatgatggcaagattacaaaatttgataaagtccttatttcacaaccaaatgatgtcactgagcattttcgtgaccctcagattttcaattatgataatcaattctatgctgttatcggggcgcaaaatagtaaaaaatgcggattcattaaattatataaagcacttaataatgacatccatcattgggagtttgtgggagatttagattttggtggtactggatctgagtatatgattgaatgtccaaatattatttttgtcaaaggaaaacctgtattactttatagtcctcaaggactagataaaaacgaattggactaccaaaacatttatccaaatacctacaaaatcggacaatatttcgatgctaactcatctaagatagttgaaccatcccctatctataatttagattatggttttgaagcctatgctactcaaggatttaacacttctgatggtcgtgcctttatcgtgagttggataggcttgccagatattgattatcctagcgatcaatttgattatcaaggagctatgagtttagttaaagagttaagcataaaaaatgggaacctttatcaatatcccgttcctgctatgaaaaatcttcgtcaacatcaagcagaatttaaaacacaacttcaaactaacaacacctatgaattagaattactggttcctagaaatgatctttcttcatttgttctctttgctaatccgaaaggacaaggactatccattactattgatactgtaaaggggaaagttatcattgaccgctcacaagccggacagcagtacgccacagaatttggtactagtcgccagtgtgacattccaaaagatgctactagtatcaatatttttatcgataagtccatctttgaaatctttataaataaaggagaaaaagtatttacgggacgagtctttccagatgcagaacaatcagggattcaactaaaagaagggcacgttcatggtaaatattttgaattaaaatattaatatggttgcaaaattaacagatgttgctgcacttgccggtgttagcccaacgactgtatcacgcgttattaacaaaaaaggctatttatctcaaaaaacagtcaccaaagtcaatgaagccatgagaacccttggttataaacctaataatttagcacgtagcttacagggaaagtccgctaaattaattggactcattttccccaacatccgtaacattttttacgctgaattaattgaacaccttgaaattgagttgtttaagcatggttataaaactatcttatgtaatagtgaaaaggatcctatcaaagaaaaagaatacctcgaaatgctaggagcaaatcaagtagacggtatcatttcaagtagtcacaacctaggaattgatgattacgagaaagttgaggctcccatagtagcattcgatagaaatttagctccacacatccctatcgtctcatctgataatttctttggaggaaaaatggctgctcaaacccttaaaaaacatggctgtcaaaagatgattatgattacagggaatgataattcagattctcctactggacttaggcggctaggtttttcctatgaatcaaaggaatccaaagttatcacagtcacaaatgggctatctaacatgagacgtgagatggaattaaaatcaattatctcgactcacaaaccagatggtatttttacatcagacgacttaactgctttattagtaatcaaacttatcagccaactagggttgtccattccagaagatatcaaagtgattggatatgatggtacaagtttcattcaagattacgtcccacatctaaccactattaaacaacctattcgagaaattgcgcaattgatggttgagatactcctagctaagattgaggggcaaaagacaaataaggattatattttaccagtcagtctcatccctggtagtagcgtttaggaaatcatatttatgaaataatttttagtaccgatagttatttttcaaagcaaattaaaaatgtggaagaagattcttccacatttttaattttcatttgttataaattgacttaataaaccattgacaaattttgctgacgtctcatctgaatattttttagcaatctcgataatctcatttagagctacacgatcaggcgtttcatcaaaatatttaatttcatagaggcctaagcgtaagagagatttatcaaccaatgttagacgttctaagctccatcctgattttaagtgactagaaatcaaagtatctaattcatctttgtgatctacaacaccattaacaagattaagtaaaaagattggaacctctaaaactttgtcttcagatactgttttatcataaccataagcaaagtgagccgcatcaataaactctccaccagtttctaagctaaatagtgtttgaaaagcacgttcacgtaaatcacgtcttgaatctttaaatacactagtcatctaagaaatcctcatcaaacaatgacttcaagtctggttttggtgttttctctggaacaataccttcaacatggatattgaccgaagaaatttttacttctgccatgtcatatacagctgttttgacagcttgttgaatagcaattgaaactgctggtacatttacaccatactgcaagtaaacataaatatctgcagctactgtatcatcttcttcatttttaaggtagacacctctacctagagatttcttactaaggctatccgttaccgctttgttacgtaacgaatgaacaccatcaactttagttgcagcaatacctgtaattacctcaagtacacgtggtgaaatgacaatttctccaagattttcagttgtcatagcttatcctttcttttagtgtttactaaggtttttccttaatagagtaaattcatcatgaatctacttaacacttttttgagagtcattaggcgcgtgaaacgtaagttccttctgctgtattgattactaacttttgtccagcttcaataaaatctggaacgttaacaacaagtcctgtttccatagttgcaggttttcctgaaccagttacagtagcacctttgattgatggttgagtttcagcaactgtcaattcaacagttgttggaatttgaacaccaataacttctgttccatagaattgaatttttacttctgagttttcaagaatgtagagtaattcattttcaatgttaacagttggaatttcatattgatcgtaagtttcattattcatgaagtaagctgtatcatccatcttataaaggtattgagcaggtacagtttcaataatagcttgctcaaatttttcttcaggacggtaacttgtatcaaaagttgaaccagtacgaacatcacgcaatttcatacgcatgattgtgttacctttacctggtttgtggtggctagcttcaagaacacggattaatttcccatcagccgtttcaaaagtcatgcctgctttaagcttacttgcttcaatcatttattaatacctctttgtaaaaattatttatcaactcattttatcacaaataacctgctttctcaaatagtttattgatttggtatgtgtctgatttcttgataaataaataaaatcaccaagagggcgtaaataagactgaagcacttgacactttcctcttacttcagttttgataacagttttaatattataccgatatcttgactaagattgaaatactgtttaggtgtttttagtgactttttagtaaattttgataaaggtagtaaactatagttgtcttattgaaacagataaaataaatcacctacggagctattcgtatgaaaatgtagttattctcgatataagttttagatacgaacttaatttgctctattgaagctggtaaaggaaatcggggtggtgttagtggacgtgcgctaagcattggtactgagcttggtgataccaatcttgcttactacatcaggtagctctctgttttagtgccatatgcaattggaataagagctgtcattggtattgaaggagccctagtccactgatcattgaattactaatttaggaggtggaatgatgaattttaatatgtctcattatagaaagttacaactatgtcgttttctaatcgtacagatacctgcgctggctttattagctattcttttatacgggattttcctaaagtacagtctattttcaaaagtattttttcttatcttttaggggttgaaatagttatcaattttgggaagtacataccagtttacaccaaccacaatttgtcgagtaaagaattgtaatttagtaaagcccttttcgttttcttctgataagtgtatcatgacatctatcaatagcatattcacactagtagcatattgatttgtttttgagtagaatttactttttagattatttctattctacactagtctttccctttggaagattctttccctctgtatttttccatttttcaatgagacgagaaactctttcttcctcctcatcatggtaaccttcaaaaacaacctcatcaatatcttcttgattaaaatagtaaacttgttcaagatttaaaccctcaggaaaaattccacctaggtaatcaaaataaacttcttgtccttcttgctcaacaattgcacctctatttacaataactaatttttgattgccatcaataagatagacaacactccctactggtaataacatacttcagttctccccaatataataatttttcccatttaacgatggttgaaactcaatgaactttataaaaaataaactgtttgaaaaaataaatccaaataaaaataagtttgaaaagttttcgtcccacaatgccattccccatagaacgatataagaaattatgattgataatattactataaatgggctcttccgtttttgattattatatttcaaaaaactagatttatatttggaaagatctaatgctttatttctctgatttagctaaaacaagactaaatatgctcaataaaataaaaagataaaaatgttctaatattaaatgcgatcttgttaagtatgcaatatttatattttttggaaaaattgagatatgaactaaataaaataaaaataaaattgtaaaagtttttaaagataaaggcgactttttttgtttactaaaaaattcttataatccgcagtcacatcataaatttgatatttttctactctttctggaaaaatacctataaaataatcttttatatcactaggattggcataatcaataatgtaataacgtccactaatactaactagataatatctaaaattaagttttgctacaagctcaacccgtctataactttttattcccattagttcacgtacctaactatttatttttgtaaaatgtttatcaatattgttaattacatttcctgtactacttataacatttctaaatgatttagaattattatacaatgcttttacaccaatcgaagcaactgctcctatcacaggtgcaatttcagtaccaattgctaatatcttattcaatcacaactccttttatatattggttccactattactatttttttctaattcgatcaataccttttttcttttataaggtctatattccaatattaatattagtacagacacaaaaagtattcccaaaataatgaataaattgaaatctaaaacttgtagaaataatttaaataaaagtaggatactaaaacttaatatgaaagagattgaaattattaatatattatgtactttagcatctttaataaatttttttaactgtccagggaaaatttctagctcttcataatcattttttcttctcatcaattttactgtaaatcctgaaactagtatcaataaagataaatatacaatagaaaataaaattgaaaaatttgaaatttctagattttcacttatactttgaattatttttccaataatagttgaaataataggagttagtagcattatacctgtgctattttttttagattagatttatataattttttcgttttcatatcataataaacagcattatcatgaaaccatcctaaattaataagattatttgtttctatttccgttttcaaatcttgctccttaattatataaagtacctaaactattattagctgaaatggatttaccaatatttttgatagtttcttgtccataattgatgatatcatctttatagttatcatacacccaatcaaatgccatattagcataaactggatttacatctattgaggtcagcaacaatatcttttctcttttttgtaaattatttttgcaattcgagattcccagcagtactaattttagatgttgataatagatggatcagctattctattatcaacatctaaaactttctgtgaaaaatcattaggaataatgactattaactggtgatcaccttttttaggccattttcagtaatcccatgactaacaattgaccaattttgagaattatctcgttcaatatatttaacataactggcccttagcttaaacgataaaaccttcaaggaagataggcatatactctatcttcctctttactcttccatccctagtgttacctctggaacatcatgttgaacataagcaactccttttgcttccataagttcaatagcaaatgggtgtgggcgataattagctttataagtaattttcttaaccccggcttgcaagagcgccttggtgcaattgatacaaggaaaatgcgtcacataaatttctgtattattagtagaaataccttctttagcacactgaataagggcattcatctcagcatgaacagtcctaatacagtgaccatcttccatataatgtcccacttcgttacagttatctgtctcagagactcctccgttataacctgtagcaatgatgcgattatttttgactaaaacagctccaacaaaagcacggtcacaggtagaacgtttagaaatcaactctgcatttgccataaaataatcttcccaagaaagtctattcattctattttcctttaaagtacaattaattctttaggtgcagatgtcaatacttcgcaacctgtttccgttattaataaatcatcttcaatacgaacaccgtatttattatcgagatatattcctggctcgtcagtcactaccatcccagatgcaatcactccctctgacttaccaaaataaggaatttcatgaacatcaagccccataccatgccctataccgtgggtaaaatgattaccgtatccagaattttcaatgacttgtcgcgccaagtaatcataatcacaacgcttcattcctgattttacattaccaataatagcttgattacttttcaaaacgatatcgtaaatctcgcgttcctgatcagtgacatgaccgatatgaatcgtacgtgtcatatcactaacatagtgctgatagtaacaaccaaaatctaaagtcagagtttctcccgattgaatagtcttctgactcgcaaccccatgtggcatcgctgatcgatatccagatgctacaataaaatcaaatgaaggaccagttgctcctaattctctcatgcgaaagtctaaaaaattagcaacttgcaattcagttgttcgatcaggctttataaaatccaacacatctaaaaaagcttggtccgaaatacgacaggcttgacggatgatcgcaagttatgttacatctttaatcatacgtaacttttcaacaacagatggagcttctatcaagcgataatcttcaaaaacttccaccatatgtttgtacatatgataagaaatatcagtttcaaaaccaatcgctatcaatgcgtcatcgcgaataattttcaaaatagccgcaagtggttctctgctaatgataatatcaaactctcttacagtattctttgctatcaaggcatatcgtgaatctgtaacaaaaatccggtgttttggactaatgagtaccgttgcattagttcctgaaaaaccagtcaaataaaaaatatttgttaaatttgttattaagagtgcgtcacatgataattgtgaaattgctgtttgacatctagttagacgttgttcaaaacccataagaaacctcgctattctaaccttaattaggttaattttatcatcttttaaaacatttagctataagaaaagcaactcatttcagttgcttttactttactattcttttatattaagagcttcttttaatgctttaacttgcatctcagcataagcttctggatttgtcttagctaatgtctttatctccatagctttcactgggtttacttttgcttgcgaagtcatttgttcttttagtttagccgcagccgattctaagtgttcggactgctctttagtcaaaactagccaagtttttcgtggtattttagcaactgatttctgagaaatcaattctccattttcacctgcaaagccataaagtagtttcgaaagactatctttccacacataacgtttagtctttgttgttactgtggcttttttcacatcagctaattggtagctagcagattttttcacagcacttgtcacttcttttgtatttggaacaaagtgagcttttgcttctttttgatttaaatctgttcgataaactaaaacattattactcgaatgagtaccaatctctttataaatcatgagaccaaatggagccttactatcacccgcactataaatctcacgtgtctttgtcttagtttcaatagtcatacctgtatgattaataaagtgatccgttaacatccaaactgaggcaaacaacaaagctaatgagagaagacctagaatataccgtagagcttttggacgaatcaacatccatgtgacaaatgtcaaaatagttgccagtgcaataatcaaaataatcatgctatacctccttttccgtctcaataattttcccttttctcaggaaaagagataccagtaaaccaagaaccgcaaatacaaaaccaatggcaaaagaaacatggaagccatcaagactagcattcaacatctgatttgcatattttaaaggattcattgttagcaaatcttttgatggtttattgttggtgataatattttgagcaacacttgaaagcaatgcaactacaactgctgaagcaatttgacgagcagtattattagctgctgttccatgtgcggcctcatgtggtggaagtgcgctcatcgcacttgctgtcaatggcatcataaccatagcaataccaaacatacgtactgcatataagagggtaataaaatgatctggtgttgtagtcgttaagaaaacaaaaggtaacgtcgctacacctagtatggtaaaaccaatcatagccatacgtcttgcaccaactttatcatatacagctccagaaattggactaactatccccatcatcaaggcacctggtaataaagctaaaccagaatcaagtgcagagagaccatgaacattttgcaagtaaagcggtagcatcatttcaacacccatcatcgccatcattgaaagtgcaatagctgctgttgttactgagaattgtttatttttgaaaacacggatatctaagaacggtgtttctagttttaattgacgatgaatgaataaggcgataaaaataataccaaccataataggagaaataacatatccaatatctccccatccataagttgccacatttgtgaagccccacaaaaagctaccaaagccaattattgaaaggataagggaaggcacttccaatttaactgacttattatcaaccacatcttttagaacaaagggggataaaattgtagtgaccgttaaaattagtaaaggaagaaggaaaattgcacgccatgttaaatcatgccctgcaaaatgaaattcttgttttaaaatccaccctgctaatgtaggcccaatagctggggcaagaccaaccaccaaaccattaagtcccatagcggcaccacgctgctctggaggaaaaacattcaccataacaacctgcatcaaaggcatagaaatccctacagaaatcgcttgaataatacgtcctactaaaaaaaggttccagttagatgtaggtgctaacgtcgtcattaacagtccaataagtaaaacaacgtaggatgtcacatacaaccattttgttgaaaaacgtgtcgctaaataagctgaaacaggaatcataatcccattcgctaataaaaaccatgttgttgcttgttgagccgttgacaacgaaatgttaaagctattcatcaaagttgggatagccgttcccaaacttgtctgatttaatacccctgcaaatgtagcaatcaacaataaggtgatcatggctgtacgattatatggtttgccatgaatatcatgttttgcttttgtagtcattttatctccaatctctatttctgattttaactaatatcttttaagaataacaaataggtcttataaggttattttttgattttttaatcaagaaataatattattttctgaaaaaatcattattttagttatcgtgagaactattttataatagctaaattttattgtcaagaaaaagattctcatagaaactatttttttcaaaacatcattatttcctttttttaaaatatctccccactatttttcctaataaagcgttctccatttaatgacttctacgcaatgttagcttacaaaaaggaactgagtaatattactcagctcccaataaactatcttgctaacttctcttttaaataatatcctgtataggatttaggattttcagcaacttcttctggtgttccgatagctacaatttgtccgccaccaatacctccttcagggccaagatcaataatgtggtcagcagttttaataacatcaaggttatgctcaataacaagcactgtattaccatcatctacaaaacgatccaaaaccttaagtaaacgagcaatatcatctgcatgaagccccgttgttggttcgtctaatatgtaaagactcttacctgtcgaacgcttatgtaattcacttgccagcttcattcgctgagcttctcctcctgataaggttgtagctggttgccccaaagtgacatatcccaaaccaacatccttaatagtctgtaacttacgagcaattttaggaatagctgcaaaaaatgtaactgcatcattcactgtcatatcaagaatttgtgcaatatttttttctttgtaatgtacttccagagtctcactattatagcgcgtgccgtggcatacttcacaaggaacgtagacatctggtaaaaaatgcatctcaattttgatgataccatcgccagaacaagactcacaacgtccacctttgacgttaaatgagaagcgtccttttttataacctcgaatctttgcctcattagtttgagcaaaaagatcacgaatatcatcaaaaacacctgtataggttgcgggattagaacgtggagtccgaccaattggactttgatcaatatcaatcaatcgatcaacatattcaatgccttctaaagaaacatatttacctggtttatctgagttacggttaagcttctgcgcaacagcttttttcaaaatactattaattaaggttgattttccagaacctgagacaccagttacggcaataaatttaccgagagggaacttgacatctaaattttgtaggttgttttctgccgcacctttgatttctaaaaagcgaccattacctactcttcgttcagatggcacaggaatcactttcttacctgacaaatattgtcctgtaatagatttagtatttttagctacttgcttcggtgtaccagaggccacaatctcaccaccaaacgcaccagcgccaggtcccacatcgattaaccaatcagctgccatcattgtatcttcatcatgttcaacaacaataagcgtattacccaaatcacgcattttcttaagactatcaatcaaacggtcattgtctcgctgatgaagtccaatggacggctcatcaagtacataaaggacacctgataaattagacccaatttgagtagccaaacgaatacgttgactctcgcccccggaaagtgttcctgcagaacgtgacagatttaaataattaagtccaacattatttaagaaacttagacggtcatggatttctttgataattggtcgagcaattaattgttcatttgaagataaacgcaatgtttctaaaagttctaaatggtctgctatcgataaatctgagacttgcccaatattaagaccttcttctcccccaactcttacgcaaagtgcttgatcattgagacgatagccatgacaagtgttacattttagctcgttcatatattctcgcataacattgcgtgtgtaatcgctattagtttcatggtaacgacgattaatattattgacaaccccttcaaaaggcaaatcaatatttctctcgcctccaaaatcgttaatataatggaaatggaactctcgttcgcctgaaccatatagggctaggtcctgctccgccttgcttaatttttcaaatggcgtatccatatcaacaccaaattgagtcatagcttgctctagcatcgttggataataatttgatgaaattggattccaaggaactaaggccccttctctaagggtcttacttctatctggaataaccaaatctatatctacttctaacttaattcctaagccatcacaggtcggacaagaaccaaagggagcattaaaagaaaaaaggcgtggctctaattcaggaacagtaaaaccacattcaggacaagaataatgttctgaaaacaataactcattgccatccattgtatcaataacgacataaccatccgacaaacgtagagccgcttcaacggaatcaaataagcgggaacgaatgccctctttattaattaatcgatctactacaatatcaatattgtgcatcttactttttgataattcaggcacctcagtaacatcgtgaatatcaccatcaatacgaacacgaacgtaaccatctttttgtattttctcaaatgttgatttgtgttgtcctttttttcgacgtataattggggctaaaatttgcatctttgttcgctctggaagcgctagtaccttatccacaatttgctctacagaagatgctgtgatggctccgtgaccattgatacaatatggggttccaacacgagcataaagcaaacgtaaataatcgttaatttctgttacagtcccaacagtagagcgaggattcttacttgttgttttctgatcaatagaaatagctggactaaggccatcaatagaatctacatcaggcttttccatatttcccaaaaattggcgcgcgtaagcagaaagactttcaacgtaacgacgttgtccttctgcatagatagtgtcaaaggccaaactagacttacctgatcctgatagtcccgtaacgacaactaacttgtctcgtggaatgtcgacacttatattttttaaattgtgagctcttgctcctcttatcattaatttatcttgcataatgttgtgcctcagcactcctttttgaatagtgttgacttattatatcaaattttaataaagtcagtatttttttagttttaaatttcatagaaaaaagagatgaactaatacgttcatactctttgttattatcttctttgttgtggtgccactggtgccattgagctttgaatattatatttacgttgtaaataaaagcgcaaaccaaacgatgctaaagcaataataaacaaaacaacctcaggaagtttaggattaatagttgcaggtagaagaggtactactgcaaataaggcaaaccaaactaacataactagtgccagtactgcgaaagatttaagccagcctggtctttcagattttggtttacccatatggcgataaatatagtaataagtaacgtacatggccgcaccaccaccaaaaccaagagttaaaattgaaataagccctgtattgacattagattgaccaaatagcaacattaaaccattcaaagcagttactaagccaagaaatagtaaggaagtatctaaccacatcaaccaaggattggtatttttttgtacagatactctagctttatcctcaggtcgctcagtgaatgaggctgcccaagtagttggtgctcctaagagtgagcgtgcggtaattccttttttctgattatctataatctctgggagatgttcttctaaaatagctttgatttctgcatctgattttccatcagctaaaagttgattagttgcaatatgaacaaactcttgattctttttagttaagtcttgtaaagtcatgtgaactccttgattaatatactattaaaaccattttttacgaataaaataaaatacaacaaatgaactcatcaaaaaggccaaaagaacaacatagataaagccatgtgcgagaccattcaaaggcatccaattattttgaaagttcatcccatacgccgaaaaaataaccgttggaatatccaatgtcatagttactagggctaaggttttcataatggtattctgattattaccgatgattgaagcagtcgtttctgtcatggcatttaagacattttcatagatatttgccatttcaatagcctgctgagtttcgatcaatgtatcttcaagcagatcttcatcttcaatgtatttttttaaactactggtactactggtcaattttttgacgattcgctcattaaattttaaagaggcctttagatagacaatagatttttccaattccatcatatcgatcaattgctcatttcgagttgcactctctagttgtgcttcaattttatcgctctgcctatcgatagtacgcaaagcctgtaagtataattcggcattgcgataaagcaattggaaaacaaaacgtgtcttcataaaggtataaaaatttttgacacgtcgtctataaaagtgatcaaacagcgtcaaatgttctaggcaagtagtaataacagcgttgtcagtaacgataatgcccataggaatagtcatataataacttttgttattgcgttcttcataggtaggaacgtcaacaataactaaagtataatcatcttcaaccgagatacgggaagtttcttccacatcgaggggagcacgtaaatcatcaatatcaataccaaattgatcagctacttgttcggattcttcctgggagggattaaccagatttatccaagcacctggctcgaatgtttcaatttctttaaattcaattgccgttgaaagaaacatttgcttcatggcgattcctcctttgttataaaaaatccataccttaatattatacaggaaaaccatttgttttgcacggttaatacggtggtatcctaaatttttctattatttgactcgtaaataccaataataatggtaaaaagaataaaaaaatagccgctagggctattttatattaatcttcatttacgtaaggcataagagccataacacgagcacgtttgattgctgttgttactttacgttggtttttagctgaagttcctgttacacgacgtggtaaaatttttccacgttctgaaacgaaacggctaagaagctctgtatctttgtaatcaacatattcaatcttgttagctgcgatataatcaacttttttacggcgtttgaatccgccacgacgttgttgagccatgtttatttctcctttatagttttaaattctgtccatctattatattagaatggtagatcatcatctgaaatatccattggatttgagttaccaaacggactctcatcacgactaaaattaggtgtttgttgagaagaagctgaataactattatttgacggagcattgttatagccaccgttattataagagttaggtgaaccaccttctcgtgtagcacgactttccaataattggaaactttccgcaacaacttctgttacatagacacgttgaccttgttggttttcataattacgcgtttggatacgacctgtaattccaaccaaagcacctttttttgcccagttagccaagttttcagcttgttggcgccaaataacacagttaataaaatcagcctcacgttcgccagattgatttttaaaattacgattaactgcaagtgaaaaagtggctaccgcttgattacttggtgtataacgaagttctgcatcacgggtcatgcgacctacaagtactacattattaatcataaactaccttcttagtctactttaacgatcatgtgacgaagaatgtcaccgttgatttttgaaagacgatcaaactcattaagagctactgcatcttcagcttcaacgttaacgatatggtaaagtccttcagtgaaatcttggatttcgtatgcaagacgacgtttttcccaatcttttgattcaacaacagttgcaccgttgtcagataagatagaatcaaaacgtgctaccaaagcgtttttagcttcttcttcaatgtttggacgaataatataaagaatttcgtatttagccattgatatgttcctccttttggtctaatgactcatgaatttttcatgagtaagtgaggttatgctcacaagatattattatagtagaaataagttaataatgcaaggtttttatgtttttatttccctgatatcatttaaagacattttttatttttctttattgaaatatgccttatatcaaacctatgtagccattttcttttactgacttatgttcaatccccattctataattcaattaaaaaataaaaaggcgaggtttacacctcaccttcaacatattatttaaagaattctttattggtttaagttttcgttggagaaaaattcagtgtctccgattttatatttttaaatattaaaatactatttagggagtccctcattatgttttattacctttggtaacaccaaaacatacacgaacttttattcatatgtgttaccattttacatctttcatattgagatatttgattagcaatacctccttgactaacaaaaattactaacacatctaggggtataccctagtttatatttgttcatgattacctcaagcaagcatgcgctaatggtaatgaactattaccacattgtctgtcttccttaaattatataaggacttatgtgtcaccgttactgtagcgacctacatctaaacctaacataagtgcccctccaactatttctaggaaatgaagaaaacttcaaatccttgtgactgtttgcaacatcaatgcattgataacaattttagtgtatcgccattcttatagcgacccatattaaaaattaacataagcgctacctccattaactaaagttagcttgcctaccaatctttcttttggagactagtctccattcttatacctagagatattgtaatagatcatggataacctccttgatttaaactttatctttataaattaattatagtgtaaacgcttccttaagtcaagaaaaaaatattgatgcaacatttttcttcatcattaagtacgatctagtcaacatacctctttgtcaaatcctctttctttgatacaattaatctatgatagatttaaaagactatggaattgagatgtggcctgaagatagaatcgcttcttttcgtcgcacacttttagggtggtatgaccaagaaaaacgtgatctcccttggcgaagaactactaatccatactatatttgggtttctgaaatcatgttgcaacaaacacaagttaatacagtaatcccttattataaacgttttctagagtggtttcctcaaataaaagatttggcagacgctcctgaagaacaattactaaaggcatgggagggactaggctattattctcgggtgcgtaatatgcaaaaggctgcacagcaagtgatggttgattttggtggcatatttcctcacacttatgatgatattgcttcattaaaagggattggtccttatactgcaggtgctatcgccagcatctcattcaacttaccagagcctgctgttgatggcaatgtgatgcgtgtcatggctcgtttgtttgaagttaattatgacatcggtgaccctaaaaatcgtaaaatttttcaagctattatggaaatactaattgaccctgacagacccggtgattttaaccaagcacttatggatctgggtacagacatcgaatccgctaagacacctagacctgatgaaagccctattcgtttctttaatgctgcttatttgaatggtacttatagtaaatatcccataaaaaatactaagaaaaagcctaaaccaatgcgaattcaggcttttgtcattcgtaaccaaaatggtcaatatctactggagaaaaatactaaagggagacttctagggggtttttggtcatttcctattatcgaaacgtcacctctttctcaacaattagatttatttgatgacaatcaatccaaccccataatctggcaaacccaaaatgaaactttccaaagagaatatcaattaaagccccaatggactgataatcactttccaaatattaagcacacttttagtcaccagaagtggacaatagaactcatagagggggtggtcaaagcaacagatttacctaatgctcctcacctaaagtgggtagcaattgaggacttttctctgtatccctttgcaacaccacaaaagaaaatgctagagacctacttaaaacagaaaaatgcttaatcacaagtgaactatgacggttcactttttgtttacaattcctttacgccgctgtaaagttttcctcagattatcttttaataccctataaatagtggtctatccctaatgtcaaatacatttgatagacccgttagcttatcatccttatactaatattatgaaaggagatatttatggaaattggtcagcaaattattcgctaccgtaaacaacaagcgctctcgcaagaagaattagccgagaaagtctatgtaagccgtcagagcatatctaactgggaaaatgacaaaacttacccagacatccatagcctcttactcctaagtcaaatttttcaagtgagcttagaccaactaattaaaggagacattgagaaaatgaaatataccatcactcaggttgataaaaagaattttgaacgagataccaaagtaatggtgacattgatgatactattaatgatttcaagttatccattagtctatttcttagagtggctaggacttggcatttttgttttattatcgataattactatgacttatgctaatcgtgtggaacgttttaagaaaaaatatgatgtgcaaacttataaggaaatcctagctgtttcaagtggaaaattattagacgaaatcgaaaaacgggaagaaagagcaaaacttccttatcagaaaccccttattgtcactgtatttttcctcattactgttgccaccttttttgcaagtcgttttattttcacatggttgttccatttaagttagtagataataaaataaagctcagcgtgacactgggctttattttatttaactcaattcagcaataatagctttcagttggtctttagtatgaacacctgcaacttgtttaaccacttctccgtcttttttaaacatcaatgttggaattgacataataccaaactgacgggcagtttccggattctcatcaacatccattttcaaaattttgagttcatcttcatcgatttcttgagataactgttctaagattggtgcttgcatacgacatggaccacaccaagttgcccaaaaatcaatgagtactaaaccttctttagtttcttctacaaatgtagcatctgttacttctaatgccatcttttttctccatttcatcttaatgataagcctattgtacaagaatctagttgtttttgaaactatttgctacgaactcgctaaataaataaacaaagccctaaaatcaagccaataaggtaacctacaataacatccttaggatagtgaatacctgctatcacacggcaaattgccaatagaaccgataatattaaacaaactattccaaagtaaacataatatcgtaacaaacacatactaatcatcgtagctgaaaaaacatgtctgctaggcattgaccttccctcagtatccttataaattaaaggtttaatattccatttttcatatggtcgtggaaaatcaaggcgtttcctaatgtaagacaaagctataaagccaacagcagggataattaatagccttaaccataattgaaatgtcatcccttgccaaagagtaaatatcagaaaagatggatagagtatgtacatcattcctgtgactatttttagtaaaaaatttaaaagaattattaactgtggggattttctaaaaggttgagatagtttggcataaaattgttcatatgattccataatttaccctaacgttacaattgtggcgccagatccccctgcattttgtggggcataagcaaaatgcttaacgtgcttattacgacgaagatattttgtcactccctcacggataacgcctgtaccaataccatgaatgatatcaacttgtcccatattgttaagcaatgcttgatcaataaaattatctaactcttgcatagcttcttcgtatcttttacctctaagatcaagtcgagctcttggtccagaactatcagcctttttaaccacattaatctgtttacttttgactttctgttcttcttggactctaacaagggtaaattcatcttgtgttaatgtcattttgataattcccacttgtgcttcccaacgtccatcttttaattgactagttaaggtacctcgctgtccatagctagtcactataatatcatcaccaattctaggagcacgagctgctttaatttttttagccttatttaagactttattttttgataaatcaacttgaggtgctaatttttttatttgtgccttagcatctataatttcgtgaggttttaattggctcttatcattgagtttttttaagatagtatcactctcattcaaagccatatctacaatttcttgagcttcttgatagattttttctaactctttatcgcgctcatgtgaaaattcattatagagtttcttaaccgcacgattgaatttgaggttttcttgttcaacttctttaatatgatccagtcttctacgtgtctcaagtgtctgtgcctctaactgttcaataatacggttaacatctgagtcagaatctgtcatctgcttagcttgtttaacaataaatggagctaaaccaaggcgagaagcaatttcaaatgcatttgatcgtccaggaactccttgcataaagcgatacgtagggctaagcgtttcggcatcaaattccatgctcgcattctctacaaaatttgtctcaatcccataagcttttaattctggatagtgcgtggtcgccatcgttttgatattacttaacctaaggtgttctaaaatagccatagccaaactagcaccttcttgaggatccgttcctgctcccagttcatcaaagaggactaaactattgtggtcagcctcgtttaaaatactgactatgtgcgtcatatgactagaaaaagttgatagactttgttcaatagattgctcatcgccaatatctgcaaagatattgttaaatactgcaattttactacctttatccgctaatactggcaaaccagactgtcccattaattgtgctaaaccgagtgtttttagcataatcgtcttaccaccagtattgggaccagtgatgacaattgcagttaaatcttgatcaaaatgtaagtcattagccacagggttacttaacagaggatgacgaacattgattaatgctaacgtgctgtcattagaaatctcaggtatcgtcgccttattatcagacataaaaagatatttagcccttacaaaatcaagatgcccaagaatccatgcattatttctaatagtggcgacatggggtcttaacaagtctgaaaatgcgtgtaaaatacgactttcttcatgacgttcgtcagctctaagctgcgttatctcttcgtttagtgtaactacagcacgaggctcaatataaacagtacttcctgaagaagagatgtcatgaaccacaccagaaatacgattccgataagtattttttactggtaggacacttcgtccactacgactagcgattagattctctgataaaagctctgctttttccttaagcatatcctgtaaaatctgacgaacccgtcgttcactgtttgttaattgacgacggatacgctctaattctggactcgcaaaatgttctaaaaaaccaccatcattgatagcttgaaaagacccttgcagattagggaattgttccaaattttcaaacaaacgatccaaagattggaaagaaacattatccaaatcagaataaaagtgaatcatatccgaagaactctgtaaaacttttttgatagccaaaagttcttgaatattaagatcagctgaaagctctaagcgttttaaactctcagagattgaacttaggctgactatgccaaatgagtgatgttcaacaaaaatctgttccatgtcagaaatttcattaaaacttttttctattttaggagcctccgtcatcggctccagctctgataattcttcttgtgattgttctgtcttgagataaggtaatatcaattccttaactttgttaaattctaactgttctaaaatcttgttattcatactcttcattatacctaaatttatcacaaaatgacaacgttaaaaaggttggaactcttactccaaccttactaaacattatattcaaagacctaccgcccaagtccttaccaaaaactgtgagaagaatggtaagtcgttaattaaaaatctaacaaacagactattccataacttttcttgaacaaatgacatagggactgttgccagaatagtcaaacacatactcataaataagagacaaaccagaacggctaaaaaaccactaataatattattttgcaagctatcaaaatgttcaactggtgctaaatgtagtaaaacacctaacaagcgacctactaagtaagataaactgtagataaaaacaaaggcaacacctgcataataaacatgactcaattgaaatttgctaatatctttaaaaaagtaaacttctactccttgtacaggattagaatacggtacccataacgtaatctgactagctaattcttggtaaaattgactagcaatcatcaaagataccattgacattaacacgtaaaagacttgtaaaaaaatacctctactgtagccaatataaaaatgccaaataacaataatcagcaaaagcaatgatagcatgattaatcctcactcactttttctttaatgtccgaaatcgttttggagcgtaacttattgagctcatcttccattttttcaatgtcaatttctcgacttagttgcactgataaagcattaattgccatgagaatagcaatcgtttcattatcagcattaggtaatttttctttaatagcttcatacttttctgtagctacacgctcaatctcttccataaaaaggttgtctttatctgtcgtcaatgtgagaggcttatctccaaagacaaatttataacgatttttctgactattatttatttttgtttccatactatacctctgctagcattataccgtaaaatagggctttcgtaaaattctaccccttatcattacttgtctattcccttattcctcttttttatgatagaatattgtctatgaacacaatcgtcatgcaagcagataaaaaattgcaagaaaagataagaaccgatttagctcaacatcatataagtaataacaatccttatgtggtattttcagctaaaatatcaggagctactgttcttttatatacttctggaaaacttgtcttccagggttctaacgcttcacatatcgcccaaaagtatggttttattgagcaaaaagaaagttgttcctctgagagtcaagatattcccataattggtactgatgaagtgggaaatggctcttactttggtggactggcagtggtagctagttttgtaactcctaaggaccatgcttacctcaaaaaattaggtgttggtgattcaaaaacacttactgatcaaaaaattaagcaaatcgcgcctcttttggaaaaagcaattccacacaaagcattattgttatcgcctcaaaaatataatcaagtggttagtccaaataacaaacataatgctgtctccgtaaaagttgctttacacaatcaagctatcttccttcttcttcaagatggttttgaaccagaaaaaatcgttattgatgcttttactagctccaaaaactatcaaaattatttgaaaaatgaaaagaatcaatttaaacaaacgattactctggaagaaaaagctgaaaataaatatctagctgtagcggtcagttctattattgcacgtaatctattcttagaaaaccttaacaaattaagcgacgacgtaggatataaacttccaagtggagctggtcaccaatctgataaggtcgctagccaattactcaaagcttatggtatctcttcgcttgaacactgcgcaaaacttcattttgccaacaccaaaaaagcacaagcattattaaaataaatagcagggaaaattatgaaagaatttattaaagaatggggtgtctttatcctcatcctctcactttttttactatcgcgtatctttttatggcaattcgttaaagttgacggacactccatggatccaactttagctgacaaggaacagctagtagttctcaaacaaacaaaaatcaatcgattcgatattgtagtggctaacgaagaagaaggcggccaaaagaaaaaaattgttaaacgtgtcattggtatgccaggtgatgtcatcaaatataaaaatgacaccttaactattaacaataaaaaaacagaagaaccttacctcaaggaatatactaaattatttaaaaaggataaattacaggaaaaatattcgtataacccacttttccaagacctagcacaaagctctaccgctttcaccactgacagcaatggcagcagcgaatttactactgtcgtgcctaaaggccactactatcttgttggtgatgaccgaattgtctctaaagatagtcgtgccgtcggtcccttcaaaaaatcaacgattgtgggagaggttaaattccgcttctggccaattcgtcgttttggaactatcaactaaaggaaattaaaaattcacctgacaaaagttgaaatagcatattatattgaaaatagggagtgacaaatccatttaaaatagggatttacaatcactccctttaactgtttattaaaaaggaaggtacaatggaagtattttttacaggaaccattgaacgcattatatttgaaaatgccagcaatttttttaaaatattacttctggaaatcgaagatacggatagcgattttgatgatgtagaagtaattattactggtactatggccgacgttatagagggagaagaatatactttttggggaacactaacccaacatccaaaatacggcgagcaactacaaagtgtacgctatgaaagagccaagcctacttcaggtggccttgtgaaatacttttctagcgaacaatttaaaggaattggtaaaaagactgcccaacgcatcgtagaactctatggagataataccattgataaaatccttgaatcccctgaacagttaagtacaatctcaggactatcaaaaattaatagagaagcattcatcgctaaactgaaactcaattatggaacagagcaagttttagctaaactcgctgaatatgggttaagcaatcgtgctgctattcaaatatttgatcactataaagaagaatcacttgaagtgataaacgaaaatccttatcaacttgttgaggatatccaaggtatcggttttaaaatagctgaccaacttgctgaacaagtcggtattgaaagtgattctcctaaacgctttcgtgctgctattattcatactttagttgagtcttctatggagcaaggagatacctatattgaggctcgtactctcttggaaaaaaccattactctccttgaagaagctcgtcaaatcgaactagatccttcaattgttgctaaggaattgacaaatttaattgcagaagataaagtgcaacatattggaactaaaatttttagtaatactctattttttgccgaagaaggcatcaaaaaaaacttacaacgaatactaaatcagcctcttgataaacaactaaatcacaaagatattgaccgtgaaatcagagatattcaaaaatctttaaatatccactacgataatatccaagaaaaagctattagagaagctttactaagtaaggtatttatcttgactggtggcccaggaacaggtaaaacaacagttataaatggtattattgaagcctattccgagttacatcatattgatttaaacaaaaatgatattcctattgtacttgctgctcctacaggtcgtgctgctagacgcatgaatgaacttaccggtttaccgagtgctactattcataggcatttgggattaaacggagatagtgactatcaaagtctagatgactatctagattgttccttaattatcattgatgaattttcaatggttgacacttggcttgctaatcaattatttgacgctttggactcgcacacacaagttattattgtcggagatagtgatcaattaccgtctgtaggtccaggacaagttctagcagatcttttaaatataaatgcacttccacacgttaaacttgaaaagatttttagacaatcagaagaatcaactattgtgactttagctaatcaaatgagacagggctttttgccagaggactttacagctaaaaaagccgatcgctcatactttgaagcatctgctaatatcatcccaaatatgatttctaaaattgttcaatctgcacttaagagcggtattgaagctcatgaaattcaaattttagctcctatgtatcgcggccaagcaggtattaataatcttaaccttatcatgcaaaatctcctcaatccattaaaagataataaccaatttacttttaatgatataaatttccgaataggagataaagtgttacatttagtcaacgatacagagcttaatgtttttaatggggatattggttacataacggaccttataccagccaaatatactgagagcaagcaagatgagatttatatgacttttgacggtcaagaagttatctatcaacgcaaagaatggcttaaaataacactagcctatgctatgagtattcataaatcacagggttctgaatttcaagttgttattctgccaataacgagacagagtggtcgaatgttacagcgaaaccttatttatacagctattacgagatctaaaagtaaactaatacttttaggagaaattggtgcatttgatttcgctgttaaaaacgagggggcaaagcgcaatacttatctgatagaaagatttgaaaacaagcaagaaatagctaattctcaaaaaattgaagatagctcaatagatcaaaagattgacaacacaataattaatacgtccattccaaaaacagcaacaccaattgagcagactaatctttcaaaaataacttatcgcctaactgaagaaaattatttaacaatcgatccaatgattggtattaatcaacaagatataagtgcaatttttgatagtaaataaattttttcataaaatcttgaaaactcttccaaatatgttataatatcattgtattaagaacgtagttcaaatttaatacttttattaaggtttatttagaaaaaggagatattatggtttcatatgaaaaagtccgccgctctctgcgcacagctacaatcactatcattgtattaaatagtttgtctttagtattcagattgtttacaggaatttcagtgcagctagccaaaactgaaattaataaagggaacacaggtaatcttcctaaagaacatatcgaagcagtcttgagcgccacaacaccatttatgctatttgtcactgctttaatagtattagtcaacattgccattgttattttctgtattaaaaatttaagagcaattaaaagaaatcaaacggttaattaccttccttattaccttggcttcgccattactgtaggacttgttattttgggttttctaactactaaagcaccatgggcaatagctataaatatcgtcttccaagctattttcggtcttctttatttccatgcttatcaaaaagcacaaaaactcaacgaacgtgatcttgaagagactaactaaaagtaaaagcactagaatctagtgcttttttcttttcaaagagagttaaatatagtcatcgtcccaacttttaaaaatctaaatagatagcttcatgttcattttccagggtcgttactgtaacacctaagagtcgtatgccaaaaactgactcttctaaggtatcaaatatcgctttagcaacttgatcaatgatttgaaaatcttgagtatactcttctaatgtcatacgtttcgtcaatgtttcaaaatccgcatatctaacttttaaaacgattgtcttaccaactttcttatttttctccagagaagcaacaactctctgaacgttctttgaaatctcagctttgatatctgcttcgttatatagtaatttcccataggttttctcacttcctattgatttacgaactctatcaggttttaccggggaagcattaatccctcttgccttacgataaaggtcatacccgaaacgaccaaacatatcaattaaagaaatttcagataaggaaaggaggtcctcaccagtataaacccctaaagcatgtaatttttcgacggagcgtttaccaacaccatgaaatttctctattggtaagggcttcaagaaatcttgagcttgatctggtaggatgagggtaagtccttttggtttctcaaagtcagaagccaattttgccaaaaatttattgtaggaaatacccgctgaacaggtcaaatggacatcattccaaatatcgtattgtatcattttagcaagtttaacagctgattttattcccattttattttcagttacatctaaataagcttcgtctatactcatcggttcaaccaaatccgtatactttttaaatatatctcgtacttccattcctacttggcgatatttttggtaatttcccgaaataaagatagcttgagggcatcgttcatacgcttcttttgaagacatagctgaatgaactccaaactttcgagcctcataattacaagtagaaacaacccctctgccgccggtttttctgggatcagaaccaataataacaggctttcctttaagagagggattgtcacgctcttccacagatgcaaaaaaagcatccatatcaatgtggataattttacgcgacgtatcatttattaaaggaaaaattaacattgttctctcccccattctctctactccattataacagattacaacttaatgatacagattaaaaaaactgtattataaaagaatcataattttgtcaagaaatatgcttgcgaaaacgtttactttttcctaaaatggatatgtaaacaaaattaaatctgtcacaatgtttaaggagaaaactatggcaacagttaaaacaaacacagatatctttgaacaagcttgggaaggctttaaaggtgttgattggaaagaaaaagcaagtattgctcgcttcgttcaagcaaactatgcaccttacgatggagatgaaagcttcttagctggagcaactgaacgttcacttcacatcaaaaaagtgattgaagaaacaaaagctcactatgaagaaactcgcttcccaatggatactcgtgttgcttcaatttctgaattaccagctggttttatcgacaaagataacgagcttatctttggtattcaaaacgacgagcttttcaaattgaacttcatgcctaaaggtggtatccgtatggcggaaactacacttaaagaaaatggttatgaacctgatccagctgttcacgaaatcttcactaagtacgctacaacagtaaatgatggtatcttccgcgcttatacttctaacattcgtcgtgctcgccatgcacacactgttactggtcttccagacgcttattcacgcggacgtatcattggtgtatatgctcgtctagctgtttacggtgctgactacttgatgcaagaaaaagttaatgactggaatgcattgaatgatattgatgaagagtcaattcgtcttcgtgaagaaatcaaccttcaataccaagctcttggtgaagttgtaaaacttggtgacctttacggcgtagatgttcgtaaaccagccatgaacactaaagaagccattcaatgggtgaacattgctttcatggctgtatgtcgtgttatcaatggtgctgcaacatcacttggacgtgttcctattgtccttgatatctttgcagaacgtgacctcgctcgcggtacattcacagaatcagaaatccaagaatttgttgatgattttgtccttaaactccgtactgtaaaatttgctcgtactaaagcttatgatgccctttactcaggtgacccaacctttatcacaacttcaatggcaggtatgggagctgatggacgtcatcgtgttaccaaaatggactatcgtttcttaaatacacttgacaatatcggtaactcaccagaaccaaacttaactgttctttggtcagatcaattaccatatgctttccgtcgctactgtatgtcaatgagtcataaacactcttcaatccaatatgaaggtgtatcaacaatggctaaagaaggctacggtgaaatgtcatgtatttcatgttgtgtatctccacttgatccagaaaacgaagacaaacgtcacaaccttcaatattttggtgctcgtgttaacgttatgaaagcacttcttactggtcttaacggtggttatgatgatgttcataaagattacaaagtatttgacatcgacccaattcgtgacgaagtactcaactttgacactgtaaaagctaactttgaaaaatctcttgactggttgactgatacttatgttgatgcgatgaatatcatccactacatgactgataaatacaactatgaagctgtacaaatggcattcttaccttcacatgtacgtgctaatatgggatttggtatctgtggttttgcaaatactgtcgattcattatctgcgattaaatacgctactgttaaaccaatccgtgacgaagatggttacatctacgactacgaaacagttggtgacttcccacgttatggtgaagatgatgatcgtgttgactcaatcgctgaatggttacttgaagccttccatggacgccttgctaaacacaaactttataaagatgctgaagcaactgtttctcttcttacaatcacatcaaacgttgcttactctaaacaaactggtaactcaccggtacataaaggagtatatctcaatgaagatggtagtgtaaacctttctaaagtagaattcttctcaccaggtgctaacccttctaacaaagctaaaggtggctggttacaaaacttgaattcactttctaaacttgatttcgctcatgcaaatgatggtatttcattgacaactcaagtttctccacgcgctcttggtaaaacatttgatgaacaagttgataacttggtaacagtccttgatggttactttgaaaacggtggtcaacacgttaacttgaatgtcatggaccttaaagatgtctatgacaagattatgaatggtgaagatgttatcgttcgtatctcaggttactgtgtcaatactaaatatctaactcctgagcaaaaaactgagttgacacaacgtgtcttccatgaagtactttcaatggacgatgcattaactaactagtttgtattcgatgaagtaggtttgattatatcaaacctacttttatctatattatcaatagtactaattacttctttatataacctcaaggaggggcctaatgttaaatcacaaatttcttcaagttctaaaatatgagggtgtcgtttcgataacaagctggatcgaattagctcctcacgttacaaacacttggaatagctacctgactattacagatgaccagcgtatattagctcctgcagcaggaatgactcatcttgaaaatgatctcaataataattctaaaattattatgactctgggcagccgtgaagtcgagggtcgtgatggttatcaaggtacaggctttagaattgaaggaactgctaagctattagaagcaggaagcgattttgaaattgttaaagaaaaatacccttttctgcgtaaagtattggaagtaactcccataaatgttatccaacttttataaaaaacttctcctagaaaattctaggagaagttttttattcaaagtacgatgttatcgcctcttgtacatgtcgtcgtttcttaatccaaagtggacggtcatcataggaaaaggttctgtttgtcaaaaaaatagctgctgcctgcttttgataatttagtgcaataaaaggaccagtataaccagtatggtttatccaatccttatctatatcccaagctaatgatcttgatttactcaaactataattattccacaaaggcttcgcaaaatcatcttttaaataatgaatagaaaatctttgtaaatcatcaatagttgaaaataaacctgcagaaccagtatgctttcctaataccttagctttaggatcgtgtacaataccatcgttaataccgactacagttggaacagcttctactctaggaccaaaagaggtttctttcatctgaaaaggagtgaaaatataacgtttgaaaagtttatccaaactatcccctaatacctcttctaacataaaaccaagtaaaagaaaattaatatcagtgtatttaaacgatttatcttccaaaaccttgatatgattaatggcatctttcagctgagtagcattcaactgatcacgatttggaataaaagggtcaattccactgctatgtgtagctaattgccttacagttaacgtctgatgatgaaacgtagggtaataataccttaatggcttatcaatatcaatagtcccttgataaactaactttgctagtaaagttcccacgccgacaacttttgatacactggctagatcatagaccaatcccgctttaactttctcattgccatcaattgtccccaagtaatgttcgtgccactctccattttcataaatagctaagcttgcaccatgataaagattatctttgatttgctccttaatgagttctaaaacagtattagttttaatcattcttttgaaatccaaatctcaatattactagtgtcagagatgactaaaatcttttctttagaatcaaggtaaacatcaagtcccaatgattcaaaagttgatttcaagtcatttaaattagtatcttcattaacacagcattctagtatctcaatatcccaagtttcatttggagcaatttgcaaatcttgtccctgtgcttctttgaaagataaattaattgggaacttcccagcaaatactttatcgtaaaaagcttcagctttcacggcatcaggtacattcaaactaatagattggaaagcaaagtttgatagacctgtagtgtcatcttttttttctaactctgggcgctcaattgccactaattgtgacaaatcatcttcagcatgaagtaagaaaaggtctccctcgggcgaaactgtttcataggcataaccattttgaccttgatatacttgaatggcttgcgcaccatttgccaaaagcttttcaatatcttttgcatcttgagacttaacaataatctttgctaacttcttagtaccattcaccgcacgagtacgataagttggggattcctcaataataaagctagcctctttgttctgccatgctgagaaaactgcgattgcattttcttcacttatcaatttaaatccaagagactcctgataaaatgcaatattcaagtctctattattaacacgtaatactgggtgtttaaatgtcaatgaatgaaataacgtcataaattcctccttgttcagtctagtctattttagataattttagataatttagcaagaatctttgtgctctcaataccataaagtcaaattgacagtttcactatttttttgtagactggatattatgaatgaaacactactattacatgggattcagcttattctgattatcgccatgattatcactttttatcagattgttagacatattaggtctcaaaaaataaatcctttcaaacgatttttcactggtttgtggatcggttttgtaactgatgctctcgatactcttggtatcggctcttttgcaacaacgaccacattttttaaactaactaagcttgttgaagacgatcgtaagatacccgcaacaatgacagctgcacacgtacttccagttttgttgcagtcactctgttttatttttgttgtaaaagtagaggctttaacactaataacaatggctggtgcagcttttattggggcttttgttggagctaaaatgactaaaaattggcacgctcctactgttcaacgtattctaggaacactgctcatcacagctgctattattatgctctatcgtatgatcactaaccctggcgctggtatttcagattcagtgcatggtctacacggcatttggttatttgttggtatcggcttcaattttattattggtgtattaatgactatgggactaggtaattatgctcccgaacttatcttcttctccctaatgggactgagtcctgcagttgctatgcctgtcatgatgctagatgcagctatgataatgacagcttctagtacacaatttatcaagagtggtcgtgttaattggaacggctttgccggtctggttactgggggaatattaggcgttattgtcgctgttctcttcttaactaaccttgatcttaacagcttgaaaacactggttgtaggtattgttttatttactggagcaatgttaatacgttcttcctttaaaaaaactatgcccaaaagtcatcattaaacgaaatcagctagcaagactggctgatttttatatttaaaacaaaaaaagaccggtaaaccgatctttctttaactattaaagatataatagtttgaacaaggctacagcgagtatacttgctacgattggtgctaaaactggcacccatgcataccaccattttgaatcttctttagcttgtccaagaatttgttttggtaataagcggtgaacaatacgtggaccaaggtcacgcgcagggttcaatgcaggtccagtcggtccacctaaagaagcaactagagtcattaccaagaaaccaatacctaagtgagctacagcaagtgaaccagttacgtatggtgaaatccttgtcgctgctgtcgtttggtcataaccagcttgaacaagtttaccaacaagttctacaccaaaatagttcttcgttaaagccaaagctccaaagaaaagaacaaaagaaccaacgaattcatttaagaaaccattaatgtaagccgctttacgacttgatttctgtccatcatctaatgcagaaatagttgaaaatgatccaagaacatgatttggattttctgtcttaacaaagtaaggttgataaaccataacgacaactaactgtccaaacattgctcctaaaatttgtgcaagaatgtattgtccaacgtgtgcccaagggaaaagacctgaaaatgccaatccaagtgtgaaagctgggttaatatggtttccagagacattaccaaacataagcgctggcatcataacacctaaaccataaccaattgcaataataatccaacctgaattatttccttttgtgccttttaagtcaacgttagctacagccccatttcctaagatgataagaaaagcggttgcgataaattctgtgatatacttcacagtccaagtgatttcgatcaatccttgtttcctcccaaaaaaatatttacaacattaaccattctaccaagtaagcttaatattgtaaagcttatcacaaaataaaattaataaaatttttaaccaaatatatttgataaaaaatagagtactaggttcggactacctagtactctattttatttagtttataaggttttcttactatcacgaacgactagcatatcaactttcgaatgacgtaaaatgtattctgaagttgagccgatcaatagtctttcaaaagtgtttaatcctgttgcgcctaccataattaaatctgctttttcccttatggggatatcctttgccaaaagagtcttaggatttccgatttcagtaatttttttaatctttgtaaggccttttgaatgtgctaatttctcaaaataggctagcacatctgctgactcttgttcttgcctatcaaaaacatagtcactaaagactccctcactttggtaagcgtgagcatctataacatgcgttagcagtaattcagcatcattacgaagagcaacatttatccctttttctaccgccaattctgactcgtaagacccatcaatagcaataagaatacgctcatatttttgtgtcatagcttaattcctcccttttatatagttttagtttcaacttgtctagatgattttaagaaatatagaataccacaaacaacaggaataatcgctgctatccagaataattctctaaaggattgcacaccagctccaagaaaaccatctttaacaagtcccaaaatgtaaggtccagcacctaaccctaaatcaagacctatcatgtaagttgacatggctgtattgaaacgatgttcctcaacacctttgattgatgctgcttggccacaagacataaaggtgccataaccaaaaccaatcaaagcacctgatagaaggtaggtaacacttcccatagcactccctaataaagcaagtcccaaagttaagaacagataacttggataaagcacccacttatctcccttagcgtccattaatcttcccatagatggtctggttaaagtgatgacaagtgcataaacaataaagaaataagctcctactgtcatcaaattaatttctgttgtatataatttttggaaacctaacacggaagcataggagatacccatcaaaaatgcaataattgtgataaaaattgcttttttctcaatgaaactatcaatagtccatgattttgatttagctaactgttctggatttaaagtaatatttttgactgggaaaacaaatgctcccaacactacaatcgcaattaaaatactacataatacaataaccattttaaagttaatatgaaggttgtctagcataaatgttcctacaaaaggaccaatagctgcggctaaacttgttgatagaccgtaaaagttaatcccctcacctcttttatcagctggtatataggctgttacaatagtattagttgctgttgacacgacgccataaccaaaaccatttaggaaacgaactaaatacattactccgatacttggcatataaaaataagctaaagttgttagtaagtaaaaaatagcccctccacgtaaaactaacttacgtcctagaacttctaattgcttgccaaatataagacgagcaatcaaagtccctacaatataaatccccgttgctaatcctgcttggctagtgctaacacctaactctttagtcgcaataaaagctatgataacggtaaacaaataatagaccatataaacaataaagtttaaaatagtaatgcctataaaatgtttgttgaataatttgtcttccaatgcaaatggctcctttttttcaatttcattttcataaacattttacaaaaatattagaagatacgatatttcaatggtataatataagtgctagtatcagactgcattaacaaatgttaaggtggtctatcaaacctaaaacatttggaggaagtcatgaatcatcaaattttacaaaattacattaatagtcataatcttccaattatcgaaaaagactaccataaataccttacatttgaaagtttagaagaagactatacttatatcctaaaagatggtattgttaaacaaagtgttctctctaaatatggtactgagttcaatctgcgttatgtgacaggcttagaaatcacttctatcctaaatacagactactcccaacacatgggagaaccttacaacgttcgaatcgaatccgaaactgcccacttttacaaagtacgtcgctctaccttcctaaaagatatcaataatgatattgaactgcaaggatatgtgaaagatttctatcataaccgccttgaaaaatctatgaaaaaaatgcaatgtatgctcactaatggtcgaattggtgctatctccacacaattatatgacctcagtaagatgtttggtgaagaacgagataacggtgatatctatattaattttgttatcacgaacgaagaacttggtaaattttgcggaatatccacaggaagtagcgtgagccgcattttgaaacaactaaaagacgatcatattattcgtattgaaaaacaacatatcattattacaaatgttgagaaattaaaagatcatattgtattttaatataacaatagaaaggatatattatgcgttataatcaattcagctacattccaactaaacctaacgaagcttttgaagagctcaaaggactaggttttccattaaacaaaaagaattctgataaagctaatttggaagcttttctcagacattcttttttaaatcaaactgatactgattacgctcttagtctccttatcgttgatgcaaaaaccgatgctctaaccttttttaaatcaaatagtgacttaacactagaaaatttacaatggatttatttacagttattaggctttatcccttttgtagactttaaagaccctaaagcattcttacaagatattaacttcccagtctcatatgacaatatttttcaaagtctacatcacttactcgcctgtcgtggaaaatctggcaatacattaatcgaccaattagttgctgatggtttacttcatgcagataatcactaccattttttcaatgggaagtctctggccactttcaatactaaccaattgattcgcgaagttgtctatgttgaaacatccttagatactatgtctagtggtgaacatgatttagtaaaagttaacattatcagacccactaccgagcatactatccctacgatgatgacagctagcccctatcatcaaggtatcaatgatcctgccgcagaccaaaaaacataccaaatggagggtgcgctagcagttaaacaacctaaacacatacaagttgacacaaaaccatttaaagaagaagtaaaacatccttcaaaattacccatcagccctgcaactgaaagcttcacacacattgacagttatagtctcaatgactattttctttctcggggttttgctaatatatacgtttcaggtgtgggtactgctggctctacgggtttcatgaccagtggggattaccaacaaatacaaagctttaaagcagtcattgattggttaaatggtaaggttactgcattcacaagtcataaacgagataaacaagtcaaggctaattggtcaaatggccttgtagcaaccacaggtaaatcttatcttggtaccatgtcaactggtttagcaacaactggcgttgaggggctgaaagtcattatcgctgaagccgcaatctccacatggtatgattattatcgagaaaatgggcttgtgtgtagtccaggcggctaccccggtgaagatttagacgttttaacagaattaacatactcacgaaacctcttagctggtgattacatcaaaaacaacgattgctatcaagcattgttaaatgaacaatcaaaagcaattgaccgtcaaagtggggattacaaccaatactggcatgaccgtaattacctaactcacgtcaataatgtcaaaagtcgagtagtttacactcatggactacaggattggaatgttaagccaagacatgtctataaagttttcaatgcattgcctcaaaccatcaaaaaacacctttttttacatcaaggtcaacatgtgtatatgcataattggcagtcgattgattttcgtgaaagcatgaatgccttactaagccaagaactacttggcattgacaatcatttccaattagaagaggtcatttggcaagataatactactgagcaaacttggcaagttttagatgctttcggaggaaaccatcaagagcaaattggtttaggtgatagtaaaaaacttattgataaccattatgacaaagaagcctttgatacttattgtaaagacttcaatgtgttcaaaaatgatcttttcaagggaaataataaaaccaatcaaatcactattaatcttcctctaaagaaaaattatctcctgaatggacagtgcaaactccatctacgtgttaaaactagtgacaaaaaggccattttatcagcccaaatcttagactatggtcctaaaaaacgattcaaagatacaccaaccatcaaattcttaaacagccttgataatggtaaaaattttgccagagaagctttacgtgaactcccgtttactaaagatcattatcgtgtcatcagtaaaggtgtcttgaaccttcaaaatcgtacagacttacttacaattgaggctatcgagccagaacaatggtttgatatcgagtttagcctccaaccaagtatatatcaattgagtaaaggtgataatctaaggattatcctttatacaactgattttgaacataccattcgagataatgctagttactctataacagtagatttaagtcaatcttatttaactatcccaactaatcaaggaaattaacttatgaaacttctcactaaagaacggtttgatgattctcaacacttttggtaccagatcaatttattacaagagagtaacttcggagcagtttttgaccatgataataaaaacattccacaggttgttgcaactattgttgatgatttacaaggttccggaagttcgaattatttctggtattttggcaatactactgatacttccatccttatgattgctcatttaaatcgaaaattctatattcaggttaatttaaaggactttgactttgcactcaatttaatagctataaataattggaagagtctcctccaaactcaactcgaagctctaaacgataccctagcaatatttcaataaataaggtagaatggagtgacaaagcaacgcgagggagactgattaatgtcatcttattggaataactatcctgaacttaaaaaaaatattgatgaaaccaatcaactaattcaagaaagaatacaggtcagaaataaagatattgaagcggcgctaagccaactcacagctgcgggaggaaaacagctcagaccagcattcttttaccttttttctcaacttggtaataaggagaatcaagatactcagcaactaaagaaaatcgctgcttctttagaaatccttcacgttgctacattaatccatgatgatgtcattgatgactcaccactaagacgtggaaatatgaccattcaaagcaagtttggcaaagacatcgcagtttacactggggatttacttttcacagtctttttcgatcttattttagaatctatggctgatacaccatttatgaggattaatgcaaaatctatgcgtaaaattctcatgggagaattggaccagatgcaccttcgttacaatcaacaacaaggtatccatcactatttacgtgcgatttcaggtaagacagccgaactctttaaattagctagcaaagaaggagcttactttggtggtgcagagaaggaggttgttcgtctagcaggccatatcggctttaacattggtatgacattccaaattttggatgatatcctggattatactgcagataaaaaaacatttaacaagcctgtcttagaggatttagcacaaggcatttacagccttcctctacttcttgccattgaagaaaatcctgatattttcaaacctattttagataaaaaaacagatatggctactgaagacatggaaaaaattgcttatctcgtcgtttcccatagaggtgttgacaaagctcgccatctagctcgtaaatttactgaaaaagctattagtgacataaataagctaccccagagctctgcaaaaaaacagttgctacaattaactaattaccttttaaaacgcaaaatttaaataataaaaaaacattccacaatgctagaaaagcagttagggaatgtttttttattatcatttatttatcgcacctatcaatcatcatagatcaccatcatcagaggctttcagctgacggtaacgttggctactttgagacaattcttgaggagaaccttccaactctaattgcccattttctataaataagatacgatcagcatgttcaataccttttaagtgatgtgtaatccaaactaaggtcttaccttccaattctttcataaatacccttagtaaggcttgttcagtaataggatcaagtccaacagttggctcatctaagataacaattgggacatcttttagtaagattctagccaaagcaattctatgcctttcgccacctgaaaacctaagtccagcttcatcaaccattgtatagagaccatctgataaatcagtgaccatctctttcaatccaactcgttcaagaactttccatacatcttcttcactagcatcttggtttccaatgcgaatgttatttagcagggttgtattaaaaaggtagggcgcttgttgtatcactccaatatagttagaaatgcaatcaccaactattgaaacatcagcatcgcctagggtaatctccccttgacttgctttcaagtcgccacgaagtagactggctaaggtactcttgccagaaccactacgccctaaaatagcaattttttctccttctttaatatccaaatctaaatgatgcaaaacccatttctcttgtggcttatactggaaacttaaattcttgacggaaaaatcgtatggcttattaggcaactgattttgagttgtttcaaaatacgtttctgataattcattaagacgatgaattgaatcagaatatttatttgtttcttgagcagcagcagacaaaccagcaaatgcctctgacaagggaaatactgttagaacaaatgctgcaatccagttagcttcgccacctctgtgaccaataaactgattactagcccaaataataaccaaaatagctagaaagccaaaaactaattccacaataagagctctacgattatcaaaggaacgaatttttttctgaacagccatgagttcactttccgaacgctcatgcaaggcgacgtactcttgaccacgttgactaaaaatccagtctgaaatacctaagacattatccgtcaaatcagtataaagatgattttttaattctttttcacgagtctgacgagcaccattagctaaaatcgaccaaagtggaaaaagaaaaatcataatagctaaataaagcaacatcattaaagcaaaccatagagaaaagaagcctgttgcaataataataaagctatataatatccacgctataatcgttggaaatattgtcctaagatacaaattttgcaaataattaatatcctccgctaaaagccccataacatctcctaaacgaaaatcacgcttcataaagatagcattgctttctaaggaatggtaaagcttcaagcgcagctgtgaagtcattcgtaatacccaattgtgactcgttaggcgttctatataacgaaaaacaggacgtccaatgccaaaagcacgtgttagtacaattggaacatatactagaagaatattactcggtagtgaagctgacttactaatcagatagcccgaattaaacataagagcactggcagaaaagaaagtcataaaaccaaggaaaagagcaattactaaggaaactttatattgtttgaaaaatggttttatccattgatctgtctttaattctttaaacaaagggattttaaacatcatttcctcccatagcatgcttcagttgatagagatatccttttttagctaataattcctgataagagcctacttctgcaactctccccttctccataacgactataacatccatttggttcaaccagtgaagacgatgagttgcaaagataactaaacgatctgacatcagtggcaacattttctcttttaattctaactctgtttcaatatctaaatgagcagttggttcatcaaaaaccataatacgacgattttgatcaagaaaagcacgagccagagctatacgctgggcttgtcctccactaagcggacgcgctccattaccaatacgcgtttctaaaccgtcaggtaactcgcttagcaagctatctaaacctaccatatgaatcgctcttaccacctcttcgtcactagcattgggagtatagaaggtaatattatcacgtaatgacatttcaaaaacataaggagtttgaggaatatagatcatctgtttatgccaatcttcttgatcaaggttagtcacttctctaccatccacttttaaagaaccattatcaggccctaaaaaaccactcagaaggttaattaagctagacttacctgaaccactaactcctactaaagcaaccttttgatgtcctctaaatcgtaaggttacatcctcaacaacacgtttttggtcgtacgcaatagcaatgttttctaaatccaaacgactctctttagaccaatcatctatgactaattgctcacctttaataccagttttgtttagaactttttgaatcgcttgaaatgcatttttcccgtctaacgttgcatgataatcactagaaaaatctcttacgggtaaaaagtattcaggggataaaatcaaaattgttaaagccggtaaaaggtaaatctgctcatttaataatcgtaaacctagaaaaacagcaacgatagcaatggataaagttgtaaaaaagtctaaagcaaacgttgataaaataccaattttcaaagtactcattgttgctttacgaaaagattcactagtttgataaatgcttttaccataacgtttactaagaccaaaatatttgagagtatcaatgcctcgtaatgaatctaaaaaatgattagaaagtacttgataggattcatattgtttatctgctttagcttgagccgcatagcctaaaataatcataaagatgataattaaaggaaaaacgataagtaaaattgcacctgattcaatatctaaatagaaaatataagctagaataatccatgggataatagacatgttaatcatcttattcaagactaaacgtaaataattttcaactaaagaaacgccatctaatgccattgtaacaacattaccagttccttgttcttgaacgactttaggacctagatcaaataacttatctaataattgacgtctcaaaagactagattgtgctgttgaaaagtcatcaagttttctatttttgatgtaatcaataacatgacggcctaaatatgagaccataaataacaaaatataaaccgtttgagaagaaagtttttgcccttcccacaaaccagttatagaaagactcaaataataagcttgtccgataataaagattgcttgaagaacatcaagtcccgcaagcaatcctaacaacttatgaatacctgacaagcgcataaccgctttatctagcattatttttctcctgtcacaatcactggcaaggtaatacgttttctaaagatataatatgcccatgctgtataagctagaacaaagggaactagagtaattgcgacaatcgacattacttttaaagtatatggcgttgaggatgcattttgaatcagcaaatcatatttagggctaattgatgaaatcataactcgtgggaatagaccttggaacaacagaacaaccactgaaacaagactgagaccactcgctaaaaatgctgtcatctctgctcctttaaaagttgaagcatgcgctaatacagctaatacaacaataaccaaaaccataattgtcgtaactatcggatgattgctaaagaaatctgtcttgaaatacaagagaactgcaaacaaggctaaaccaagatagagtacccaataaagcaactgagcataattacgggcacgctctctaattggcccttctgtcttcaatgcaatgtagtttaaaccatgaagataggctagcaataccattgcaactccacccaccaacgagaatatattaaagtaatcactgaattgagctgataagttaccactggcatcaagtggcataccttgaatcaaacttataaacataatcccaaagaagaatggaacaatagcggaaccaattgttaaggtccagttccaaaactgctttttctctgcaggaactttatgtctaaattcgaaggaaacaccacgaataattaatccaaagagaatcgtaaggagaatcaaatagtaaccactaaatagtgaagcataccagtatggaaaagaagcaaacattgctccaccaccggtaagaagccaaacttcattaccatcccaaactgggccaatggtttctactacttgatctttttcatgctcattatgtgttaaagtttgaacagccatcccaaccccaaagtcgaatccttcaaggaagaagaatcctgaaaataggaggccgattaggaaaaaccaaaagaattgtaaagcactcatttagtatgctccttcctcaaagggatcaattgaagtatatgcaccatgatgtccgtgttcatcttcatactctggccctttcttcaattctcttattgttaggcttatcatcatcaccgctaaaccaccaaacaacaagaaatacacagtattggaaacaaataatgatgcaactgaaacgtttggagagacagagtccttaatcttgaaaagaccatagacagtccaagggtatcgtccttgttctgtcacaatccaaccaaatgtattggctaagaatggtgcaaaggttgttaaagcaacaatccaaagcatccatttgtgtttataaagaattggttttttcttacgagttaaaaagagtcctaaaacagaaacacccataatagctgttcccatcgccgccattgtacggaaaccatagaaaagtaggttaaccattggatagtagttatctttaccatacttagcaaccaattctttattagctgtatccatacctttcacagaaccagatggtttcccgtaagataaaatactcaacatataaggaatcttaatcccaaaaacttgtttgtgttctgcttcatttgcccaagcaactacactccaagctgcaggatcacccgaatcttcataatcaccttccatagcagcaaatttcattggttgatcgtgaatcaaggctttcatttgtaaatccccaactcccataactgaaattgaaccaagaagtgctactactaaaccaatacgaaccgatttcttataaagttcaaccgttgtatctttcagctgttctgattttaagaggcggaaggctgacataccagcaaccactgtaccacccatcgtaatggcaccaaaaataacatgggtaaattcatagaagaactgtggattttttacaagtgcaagaaaatcagtcatttgcgctctaccgtttacaacttcataaccaacaggatgttgcatgaagctattagcagtaagaatccacatcgctgacattaatgagccaaaaaccactagccaaatgaatgtcacatgtaattttttactaatttttttgttatcccatgtaaacatccataaaccaaggaaagtagattccataaagaaagctaataaagcttcaatagccaatggagctccaaaaatatcacctacgaaacgtgaatagtctgaccagttcattccaaattggaactcttgaatgatacctgtcacaacaccaaccgcaaaactaaggagcatgatattaccccaaaattttgtcaattttttatactcttcattttttgtgataacatacattgtctccataatagcaaccactaggcatgtaccaattgtaaatggtacaaagaaaaagtggaaaactgtagtcatcgcaaattgaaaacgagctaaagtttcaattgtcatacaaaacctcttattttgttttaatcatttcttttatagaaatatctgcaagagctagtttcctagcttcgtaacaattggtaaataacttactttaatatcttaatgatataaatcaaaacgtcccttagctagaagttctttaagtccacccatatcaacaagtgatttgttcatgataatcttcttcataaccgacgcagggtattttttaattttagtttttccaacaacaccaagtccatgcgtatttcctactgaagcaactgtgccttgcggactatacgaaaagtcttctgtagcttcacctttgatttgatgtaaaaggtttttagcaacatgagctcccatacgagttgcaatttgagctgttgttgggaatgggcgaccagactcagtgtccataaatgcagacacatcaccgataacataaacattatcgtattttggatcacgcaaatcactgttgaccattacacgtccacgacgttgatcaaatcctgattctcccataaccggacttccactaacacctgttgtccaaatgatagtacctgcggtaatagatttgagttcttcatcctctttactagtaccataaacaacttcacccggtttgatttccttaatcatacttccaagcatcaaattaatacctaaatccttaattaagttgacaccatattgcgctaattcatcatcaaacattggtaggatgcgagttgctgcctctacacaaataatttcaatttgttcaggttttacacccgctaaagcagcatattttggtcgctcatcaaccatagctccggctaactcaatacctgtaaaaccagcaccacatactaagagtttgagaagattttcatcttttgtctcacggtacaacttcattgtattaacaatgtgattatggatgttttctgcttgcgaaatattggtcatctgcaaagcattctccatagcacccttgatgccaaaagtttcagatacaaagcctaaggcaactacgacataatcataatggagttcaccgttatttttaactgttactgttttattttcagcatcgactctaagcacctcatcttgcatgaagttaaccttattagtgttgataacatccttaattgggaatgtaattttttcttttggctgagagcctgcagctacttcatgtaattctgtagcttcgtagtgataatcattcatgtcaacaagggtaatatgaaaatcacctgattgtttttgtaaattacgaactgctttcaaaccggcataaccagcacctaaaactaggatttctttcatgataaaactcctctaaaaaatgattccaattagatacgttaagacttgggttgcagatcccagtgctagaatacgtaccgcacaaacaaatgtttctctcttaacctgtttttgccacaatagttttgtctgcttataaataaatggtattaataacaaactcaagagtactgtaacaggcgcaagtccaaaaagaaattcaaaaacaattgccaataaagctatactattagaaatagcaaacagcaagagtccacctcttatccctgtataatgtacaagggtatagcgatgatttttttcatcttcttctttgtcgcacagattattcgccaacattagattggcaatccataaggtgttcggcaaggaaatcaagaaaattttgcttaagttgaggatatcccacgaaaagttttgataagtgtttagatatacacaaattaaactaatcataaatcccattgtcaagccagaaaatacttctcctaagggcagactagataaaggtcttggaccaaaggaatataaaacaccaattccaaaacaaaaaagtcccatccataaaagaggcagaccaacttgggaaactaaaactaaaccaatcatactagaagtaatgactaaacttgccataataacttctatttggcgtagggataggttctcacgaccaataatgttagtgtcattcttataatccaaatccacagcattccgataatcattgtaattattccaaatgtcaacgaacatattgaataaaaacatagcaacgaagaataaaccgacatatacagggtgtactgaattgtagtaataagcactaaaacacaaaccaatcaaaaatggtaaaacactagctgttttggctttcatttctaccaactctagaaagattggtaatgtcattattaaagtcctctctatacataatcttcaacaatactattataatgcaatttctaccatttttaaaacaatagggcttgatttttgattaaaaatacaaaaaatttttcttaaaatgagttaatcacacttagaacactaaatactattttgaggagtcctattcatcacactatgccatgtaatattcggaaaaatagtattgcaaccctcaactatcccttatgttggcaccagcctttgaaagtcctctgattgcactgcttagttagtattttcatcagctgtatgatctctaagagccatcagcatactaaaaaaactagtattacactttgaaaagtgtaacactagctccaatttgttttaaatagcttaactatttaatcattaatctactttatatatttaagcatttaaagttgaatgttggttgaggatacctgagagagaaccttgaatataatttggcaatacttgtttttgagcacgttcatagatttctgaatctgttaactgacgttctgatttggggcttgatacttgcggtgtcactgctgcattttgttgtttgtaaagtgttgaatgctggttaaggatacctgagagagaaccttggatatatcttggcaatacttgtttttgggcacgttcataaagttctgaatccgttaactgacgttctgcttttggaggtgttgcttgcggtgctgtgaaagttgaagctgaaacaccttgtgtagaaccaagagctacgaatgctcctccagcaaacattgctgagacaagaccaagtttcaaatagttagcagttgagacgttgttgacttttttttctgtaataagtttgttcataagaattacctctttcttttgggttatttattttatgaactaagtataacaacaagaaataaagtaaggttaaactaaatataaaataattcttaagtcattcttaggaaaccataaaatcatacactaacaaaaaatttggtatctagctcaaaagtaaaagtagaataaaggcttttacttctgagctagtaatgaataaattatatttgcatctagtttggaattagccctagtgtattataatgatccctacaaatatgtgccaaacaccttcttcatatatacaagattgatttaacattcctatacccttaatggtgggcacattctcttcatgttccatatagaaatcaacagataattccgtattgtccctattattaaattttccagttaatgataaattatatcatccaccttgaggtgtcctattaccaatctgttcaacctttacacttgacgaatcgaattgaacagattctgtcttatcattctgtgatttagaacatcaacaatttcttgttcatgttctttgaggtaagctagttgttcttctttaacgtgcttttatctttcgtacttactgatacttgagagcatttttttgaccctacttcttactaatcagctgacgtccctataagatgaatcataaacacatagctgccactaaccattttaaccttttatgcatacataattcttcttgatatcccataccattatctttagtataaacacttaataaaacaagcatttaacaactaaggttaataaaattcaataaatctaatccttctacttactttagtttatcacttttttctctcatcctatgctataatagtaaggtatcaaaatttaggagaatatagtcttatgatgaatatgcaaaatatgatgcgtcaagcacaaaagcttcaaaaacaaatggaacaaaagcaagctgatttagcagctagccagtttactggaaaatctgctcaagagctcgttaccgtgacatttacaggcgataaaaagctaatttcaattgattacaaagaagctgtggtagaccctgaagatattgaaacactacaagacatgacaactcaagctatcaatgacgctttaagccaagttgacgatgctacaaaaaaaattatgggagcatttgcgggtaaaatgccattctaaaaaataaatcacatttactgaatcacctgtaaatgtgatttttatttcaaacttctttcattttttcacgaaaacaagttttattttcaaaaaatatttgcaaaaaatcagcagagaggtataataacattgaaaatattagagagaaggtgactaaccatggttatggatagtctaatcataaaacagttgattaagagtacatttgatatacccttacaagtcacttatccaaatgggaatattgaaacttataatggtagcaatccccacgtcaaacttaaactaaacaaaaatttctccgtctcggagctatcaaaagacccttccatagtattgggtgaagctgttatggatggagacattgaaatttatggttctatacaagaattaattttatcagcttaccgctgtggagacagctttctacgtaatagtaaatttagcaaattgattcctaaacaatttcatgataaaaaacacagtaaatccgacattcaaaagcattatgacatcggaaatgatttctataaactgtggcttgatgataccatgacttattcatgcgcctattttaaacatgaaaatgatagtctagagcaagctcaactaaacaaagtacaccatattcttaataaattaaatgctcagccgggagggaaattactagacatcggttgtggctgggggacacttatcattactgctgctaaagaatatggcttaaatgcgacaggtatcaccttaagtgaagagcaggcttctttcattactaagcgtatcaaggaagaagggttggaaaataaagtaacagtcctcattaaagattatcgtgacattcgtgaaacatacgattatatcactagtgttggtatgtttgaacatgtaggaaaagaaaatttatctcaatacttccaaaccatttctaaaagactcaacatcaatggtctagctcttattcatggtattactggacaagtgggtggtaatcatggtagtggaactaattcttggattaataagtatatcttcccaggaggatatatccctcgtttaactgaaaatttaaatcatatagctagtgctggacttcaaattgctgacttagaaccgcttcgtcgtcactatcaaaagactctcgaattatggacaaaaaatttccacaatgcccttcctgaagttcagaaaactcatgataagcgttttatcaatatgtgggacctctatcttcaatcttgtgcggcctcttttgaatctggcaatattgatatttttcaatacttgctttcaaaaggtgtttcaaaagacactatgcctatgacacgcgattatatgtattctgctaattgatatagttaatattatagtattccaacttattctaaataaaaaggactctcttgaattcaagggagttctttaacgttcttctctggctaactctatacaatgtgacttttggtgacaatgtggacagaatacttttcgcgtcttaggggtatgtttcgctagattaaatgcttgatatgtcggtgtaaaggtttgatgacaatttggacaaagataaacaacctgttgtttaaaataccaaaccataccattcatagctattaagaatactgttactgctatccacataagccatctttgatttagagaaactgctgctattattaacgtaatatagaccataataatcataacgacttgtagcactatgcttttttgtagtataccccattttcttttgttttcttccataagcacaatgtcagaaagatagcctaatgttttactatcttgtttttctacagtttttagtaggttgacagctttgtcaagtttgtcttttttactatcaatagctagccttaattctcttatctgcacttgtaaaaaaagctctaaaatctggctagcattgtcttcagtaaatagatttttgatattatcaattgaaaaatctaaatctcgtaaataaataatttgtctaagcttttctaaatcagcaatactataaaccctcctacctccttcagatagttctgatggggataaaattcctcttttgtcatagtactgaacagtacgaacagtaactcctgcttctttagctaagtcaccagtggaatatttttctgacatgtttcacacctcctttaatatagtaaacacttctttatcagaaacacctttactatatcaaatgacctaaggtaataagcaagtaataacgctaagtatttttaactttaaataaaactacaacaattaatcaaacaaatttcctaaagtcgcaaatgggctatcaactgctacctctttttgctgttttaaatagattttattttcatccaagtccagaaatttttcataaacacgcgcagtcatacgggcatcctctaagctattatgtgctttaccctttattcctaaaaagtcagcaacagtagtcaatttaaggttgacaataccatttaaatctgtactgcgtctcacaaaagcttcatcatataagtccacctgatattgactagttagatccaaaccattttcaactaaaaggggtaaatccgatttatacccattataaccaatcagtggtgtatctccaacaaaactctgaaagtctgtcaaaactatctcaattttaggagcccctataatatctctagctgtaatacctgttaaaccattaataaagctttgtaatggaacttttgtgtgaacataagtatcaaataaagcaatctcttgatgattagaatatttaacggccgacacttgaataatatggctatgctcaccaaccgtgttaaactctaaatcaaaagctatatattcttgtaattgtttcattatttctcctaaaaagcgcaaggaaactccttacgcttttattctattttttattgaagaaacgtccaaagaaactttttttaacagcttctaattcttgaattttttcttctttggcttcttgaatctcctcaacctctgctttagcttcatttaactcaagttgcagacgttgcgtatcttccatagcagttaaagtcaattgctgttgttgatctaattgcttatctttctctgctatttgaatatcttttacatgtaactgctcgtcttttgaagcaatctgaatatcttttgcttttaactgttcatataaacgtgtgatttcagtattcttctcatcaacgagaatttctaaaagttctcgtcttgatgcttcttcgtcaattggttcctcttccaaaatagtttttttatagatttcttccaatttaatcaagccatcacgattaacaactgtaacgcctttactattcttttccacacattcttcagggagtgttttaactctgttattcatcgcttgacgactaacccctaaaatttcagctaattcactaaccgtcttttcaactgtcataacttcctcttttgtactgattttcttataaaagaatatcacaatcctaatctagtgtcaatttactgtcaacttaaagtgtcaaacaagacattttgacgtctatttctctatttatatgctagaataagattatgaagcattatgacacaataattataggtggtggacctgctggaatgatggcagctatttcctcaaatttttacggcaacaaaacacttcttattgagaaaaataaacgtttaggcaaaaaactagctggaacaggtggtggccgctgtaatgttaccaataatggaaaccttgatgagctcttagctggtatacctggaaatggccgtttcctatatagcgtcttctcacaatttgataaccatgatattattaacttctttcaagacaacggcgtcacactaaaagaagaagatcatgggcgtatgttccctactactgataaatctcgtactatcattaacgcccttgaaaataaaataaaagaacttggtggtcaaattatgactgacacagaagttgtctctgtcaaaaagataggagattcattctatatcaaaactaaagatacacagttcgcatccgataaacttatcgtaacaactggtggtaaatcctatccgtctacaggttctactggtttcggtcatgacattgctcgtcactttaaattagaagtcacagatatggaagccgccgaaagccctcttttaactgattttccccataaaaaactacaaggtatctccttagatgatgtcactttgtcatttgaaaagcatattattacacacgatcttctctttactcattttggattatcaggaccagcagccttgcgaatttctagctttgtcaaaggcggagaaactatatacctagatgttttgcccaatatctctgttaaagaattggaaatacacttccaaaatgaaagagaaaaatctttgaaaaacgctcttaaaatacttcttcctgagcgtttagctgaattttacgctgaagacttacccgaaaaagtaaaacaagtatctgtaaaagacttagaaatgttaattcaaaaacttaaaaaacttcctattttagtaactggcaagatgtctctagcaaaatcctttgtaacaaaagggggagttgatcttaaagaaataaaccccaaaacacttgaaagtaaaaaggtagctggtttacattttgctggtgaagtcctagacatcaatgctcatacgggagggtttaacattacttctgccttatgtacaggctgggtagctggtagcttacactattaatacatgaaagctgaacaattccgtcagcttttttatatagaatttaaagataatatttggctcttaaggcttctttgattttttccaattcatctggtaaatttacctgatgaatagcatacccaatctgataaggggatactataaaacgaggaacaattttacaaataagacccccatcatgcttatagaaaaagagattataagatttacagcgccctcccaagaattcatttaaaatataatgacacaaaattggtaaactatctgcaatcaaaatagcgttttccaatttggatactttaattgtgaactctgtgaaatcaagcataggacgattggcaatactaatctctgcttgttgactcgtttccgaacaaacctcgataccatcaaaccaatctaagttcaacgtttcataagcatctacgttttttaagccaacaatttggctatgaggatgtcgtaaacttccgccagataagggcccaaaatttcgataaagaacgaccgaacggtaatgaccactttcttccattaattgccattttgacaaaagataatctaacaattggcgcatctttgactcactataaactgaaatatccccattgtgatcatttgattcaatcaccaatgtttgataggtttcttctaaagttgggtatttattttctacccagatcatatcgtctttcacgtctaggatttttcctaattggcttttatcacaaaatggacatttgtctttattgctgggtttttgtttcgcgatattagggttaaatcggatatatctttcattcatactgttattgtaacacattcatcaccattacaatataatacttatccagttaacattttccttgcattcttagctgaaaagagtataatagaatcatgtcttgtttactggttaattaccagtaaactaggtaccctgttttgggatagaaaaatctttttgggaaaggagaaatcatggctaagaaatcaaaaattgctaaatttcaaaaacagcaaaaactcgtagaacaatatgctgaactacgtcgtgagttaaaagaaaagggtgattacgaagcacttcgtaaacttcctaaagattctaaccctaaccgacttaaaaatcgtgatttaatcgatggccgtcctcacgcttacatgcgtaaattcggtatgagtcgtattaacttccgtaacctagcttacaaaggccaaattcctggcattaaaaaagcaagctggtaattcgtgaagacaaatagttactttttatgactattctattgagtgtggacgaatagttaatacattgtaattatttaacctgttgagtatttactcagctattacaaacttcttcaaaattttattatcataggaatgtaggatctcatcaatccttaaatgactaataataaaagatgaaaaaatttttcttatctcaaatcatagatgccaatttatttattttcaaaaagcccggtatgccaagataccgagctttttattattataaatactgataaaattcttttagttaatcccaaaaacaagactattattttgtaatagtcactactgaataatatttcttttattaaaaactcacaagacatttcttaaagcagttacatcttcgcgactagttgaccaactagttgctagacgtattacagtatgatggtcatcatatttttcccaaaaactataagctacattctttgctaaatctgctagttttgtattttctacaataataaattgttgattagttggtgattttaaatagaatgagtaacctttttcttctaaaatgatttttaattcctctgctaagtcgatcgcatgctttccaatttttaagtaaaggttatccgtaaagaaacgatcaaaagcaagccccagcaatcttcccttggctaataacgcaccatgctgctttacaattgtagtaaactgttttggacgatttttctttgtgaaaacaactgcttccccagcaagagcccccattttggttccaccaatataaaaaacatctgataaggctgcaatcgttgggaaatcaacatctgtatctttcgcagccaaaccataccccagacgagcaccgtcaataaataaggggatttgataatgtttacaaatcttcgataactcttctagttctgctttactataaagtgttccatattctgttggatgtgatatataaaccattcctggaaaaaccatgtgttggtaattaccatcagcataaaaagtctcaatataagttgcgacttcgcttgcgagtaatttcccattatgagaaggtaaagtcaataccttatgccctgaaaattctatggctcctgcttcatgactactcacatgacctgtttctgcagcaataactccttcataagaagcaagcatactactgataactacttgatttgtttgagtaccacccactaaaaactcaacttcagcttgtggacaggaacagacttctcgaattttatctgccgcttgttgacagtaactatctgtcccatatcccgatagaccttgatcattagtttcaataagggcatttaaaagctctggatgagctcctttattataatcattttcaaaatgtaacattccttaactcctttattagttaaaaaaatagcgacaatatcatttgctaatatttttgaatattcaatcattataacaaataaaaaatatcaaaacaagcgttttgatattatgaacacctataaactctcaaaagctaaactaggtttggcattcaattttaaagaagcaaaattctctttttcaaactctatcgctgctgctaatgcaatcattcctgcattatccccacataatctaagaggaggaataaccacatcaatatcaggagaaatatcagtagccaagcgttcccgaagtccttgattagctgcaactccaccagcaacgactaaagttttcactggatactttagcaaagctttttgagttttggccaataaaatatccaaaacagccgcctgaaaggaagcacataaatcttcaagaaccaatgcttcacccttttgttctgcattatgatgtaaattgataaatgcagattttaatccagaaaaagaaaattcaagatgatcttctttgatcatcgctctaggaaaatggtaagtatcttgacccttatgagctaactgatcaatctcgcgacctgctggataagttaagcccataacacggcctactttatcataagcttctccaacagcatcatcccgagtttctcctactattttgtaatctcccggttcagaaacatatactaattctgtatgtcccccactgacaagcaaagctaacaatgggtattgaagttccttaacgtcacgtgctgccattaaatgacctgccatgtggtttataggaattagaggtaatttatttgcccaagcgaaagcttttgctgcagccatacctaccaataaggctcctactaatcccggaccatatgttacagcaacagcatccaaatcgctagcaacaatacctgcttcttgaagagcatcctcaaaacaggttgttactacttcaacgtgatgacggcttgccacttcaggaacaacaccaccaaaacgtttgtgactttcaacttgacttgcaataatattagctagtaactctttatcattttttaaaatagcaacactagtttcatcacatgaactttccactgctaaaatatatctatctttcataatgatattaatccatcaatatcgtcttttccattagtattgaggactattcatatcctttctatcatcaactatttatcccttgcgcatcactatagcatcttcaattggatcatggtaataatttttgcgctttcttaaaactacaaaaccacacctctcataaagtttttgtgctacgatatttgaataacgaacctcaagaaaaactggcacctctatatcagcgatcattgacattaactggtaagcataacctttaccttgataattttttttaacagcaatattagtaatttctacttcacctaccaattgttgaagagccaaaaaaccaatgacttcaccgtcattataaacaaaaaaataatctgttgaatctttttttaaatcttctgaaatctgcgataaactccacggagatttgtcatagacatcagatagtacgctccatatagccagtgcttgttctgatgattccatctcaaactctcttaatatattcttctgtattcgtttcacagtggttttttaaccaattttcctcagcttcaacacgttttaagtatcgtggaacaaacgcatctacattaacgcttttcattttttgtcctttgcgcccaattgctactgcacaaggtaaagtttctgtaattttagcatgtggtaaggctttcttaatctgatcaaaaaatgctgcaacctctccgacaaaatgaacattggctttattccccacctcttgtaagacttcttcaagagaagtgtgacagtctggtttaacagtatcaccattttgatagaaaccaacataaacattattacgtcgtgcatctataagtggtaccaataaatcattttctgaaaatccatttgttaaagcgtacaggctagatactccaactaagtcaatcttaagcgtataagctagcatttttgctgtagcaacagctacacgtaagcccgtataagatcctggaccctctgctactacgatacggtccaaatcttgaggttctaaatcaattgattgcattaaaaaatcaatggctggcatcaaattaatgctatgattctttttgatattgatagtgacagtcgctaaacattccatattgtttagtacagccactgatagtgctttgcttgaagtatcaaaggctaaaactttcatcatttaacttcccttacttgattctacctcttattttatgatataatcatgataattgcaacgaatcaaggttaattctattactctataaaaacttaataatggtttgtcattgtctcacttaacggcattgacccatttttttatagttagaaaaaccgagagataagaaaggattattatgatttataaagttttctatcaagaaacaaaagaacgcaacccacgtcgtgagcaaaccaaaacactttacgttactattgatgcagctaatgaattagaaggtcgcattgctgcacgtaaactagttgaagaaaatacagcttacaatatcgaattcatcgagttactttcagacaaacaccttgaatatgaaaaagaaactggtgttttcgagctcactgagttctagaaaggagttaaacataatagctagagtaatctacccattatgataaacttattatgtcaaatatcaacttaaaacccgaagaagttggggtttatgcgattggtggtctcggtgaaatcggaaaaaatacttacggtatcgaatatcaagacgaaattattattgtagacgctggtattaaattccctgaagatgatcttttgggaatagattatgttatcccagactattcatatatcgttgaaaacattgaccgtatcaaggcccttgttataactcatgggcacgaggaccacatcggtggtattccttttctattaaaacaagctaatttaccgatttatgcaggtcctctcgctcttgctctaatcaaaggtaagttagaagaacatggtttacttcgtgacgctacattatacgaaatccacgctaatacagagctgacttttaaaaacttaagcgttacatttttccgcactactcactccattcctgaaccattaggtattgttattcatacccctcaaggtaaggttatttgtacaggtgacttcaaatttgactttacacctgttggggagcccgctgacttacatcgtatggctgctctaggtgaagatggtgtcctctgccttttatcagactcgacaaatgctgaagttccaaccttcactaattccgaaaaaattgttgggcaatctattatgaagattatcgaaggtatcgagggacgtattattttcgcctcttttgcttcaaacatcttccgactccaacaggctgctgaagctgctgttaaaactggtcgtaaaattgctgtttttggacggtcaatggaaaaggcaattgttaacggtattgaacttggctatattaaagttccaaaaggtaccttcattgagccaagcgaacttaaaaatcttcatgctagtgaagttttaattatgtgtacaggtagtcaaggtgagtctatggcagcacttgctcgtatcgctaatggtactcatcgtcaagttactttgcagcctggtgatactgtgattttctcatcaagcccaatccctggtaatacaacaagtgtcaataaattaatcaataccattcaagaagctggtgtcgatgttattcatggtaaaattaacaatatccatacctccggccatggtggtcaacaagaacaaaaattaatgttacgcttgattaaaccaaagtatttcatgcccgtacacggtgagtatcgcatgcaaaaagtccatgctggtttagcagttgacacaggtattcctaaagagaatatcttcattatggaaaacggtgatgttttagctttaacgagcgactctgctcgtattgctggacatttcaatgctcaagatatctacgttgatgggaatggtattggcgatattggtgcggcagttctacgtgaccgccacgacttatctgaagatggtgttgtccttgccgttgctaccgttgatttcgattcaaaaatgattttagctggaccagacatccttagccgaggctttatctatatgagagaatctggggaccttattcgcgaaagccaacatatcttattcaatgctattcgtattgcactgaaaaataaagatgcaagtatccaatcagtaaatggagctattgttaatgccttacgcccattcttatatgaaaaaactgagcgtgagcctatcattattcctatggtccttacccctgataaataaacaaaagaacggaaaatactttctccgttctttttaattgcctatattagcaaaataagttaatatatcaaattacttctgggataactatagaatataaaagaactccaaacagtatcgtacttttataccgtctatgtgaggagttctttatagattaattcggataaatgtagctaactacccctggtgttactgtattttgtggatcaaaccaaccacgataattatcaatccattgatgacctgcataattagattctaaaacctgaattttattagtgacaggatctacagctgtaacataagccacatgtccataactaccatcagtccaacatacgatagaacccacgcgcggttgtgtccctactgtataatcagctgatgcggcgctcgcagcccaatcaccaccgtttccccaccagttacctgcccatgttgccatctcctttacaccccatgtgcattgacctagtggaaacgtattactagctggatgtgcttgagcaatttcctccgcacttgctaggtagtctacatctactgcatagttatatgtattcgcatctgcatttgttgaagcaaatgaaaaagcggacaccaaagccactgttccaagcattgttttagactttaattgttttatgttcatgttttcctccatctgatgactcctagtttatcaaatccatataacagacaaatgaaaacctgtaacaagttttaggcaattttttacaataatttacaaaaaaactagttttagactttacaaaataaagcctaaaactagttataaacattcttatgattaatataaatctaggtaattatcaatttcccattgtgaaacataagtcgcataacttgcccattcaatacgcttagcgtctaagaaattagtatagatatgagttcctagggccgcttttaccacttcatcttcttcaagtgcttcaagagcattatgaagagtagatggtaaatcaacaatacctgcttgacgacgttcttctacagtcatagcatagatatttgtctcaattggttctggtgcttcaattttattctcgattccctcaagtcctgatcccaaaagtactgataaagcaagataaggatttgctgttgggtcaaccgagcgcaattctaggcgtgttcccatacctcgagatgcaggtacacgaataagtggcgaacgattgcgacctgcccaagcaacgtaaactggtgcttcgtatcctggtaccaaacgtttataagaattaacagttggattaatgatagctgtgtaattgtaagcgtgtttcattaacccacctaaaaagtagtaggcatcctctgataattgcattccacgtggatcttctggatcaaagaaagcattgttcccttcattatcaaaaagagacatattacaatgcatacctgaaccattgataccaaacttaggttttgccataaaagtagcatataaaccatgcttacgagcaattgttttaacaaccaatttaaataattgaatgttgtcacaggcttttaaaacatcatcatatttaaagtcaatttcatgctgtccaactgctacttcatgatgactagcttcaacttcaaagcccatttgtgttaagacattaacaatttcacgacgtgtattatctgctaagtctgttggagctaagtcaaagtagcctcctttgtcattaacatcaagtgttgggttaccattttcatccattttaaataggaaaaattcaggttctggtcctaagttaaatgacttatagcccatctcttgcatacgtttcatattacgcttaagatttccacgtggatctccggcaaaaggttctccttctgctgtatagatatcacagattagacctgcaacagctccattttcatctccccaaggaaagacaatccaagtatctaaatcaggatataaatacatatcagattcattgatacgaacaaagccctcaatagaagatccatcaaacattgctttatttgataaaactttgtctaattgttcatctgtagccggaatttcgacatttttcattactcctaagatatctgtgaacatcaaacggaggaaggtaacatttttttccttaacttcgcgacgaatatcttctgctgtgatagtcatatagtctccttaatatctagcttgactgcatgtttacaaatgcatatttccaatgtgctgtgaaggacttgaaaaacgcccttgattacggagctcatcttgtaaaagtcgacgaacctcggcatctgataatgacttttgtttctctttggacttatgttgtctttgcatgtattcatttttaatatcagaaatatgcaaaccatcgctaatgaagtcttttatttccagtaagcggtccatatcattcagtgaaaacatgcggcggttaccttcagtacgttcaggtgtgattaacccttgatcctcataatagcgaatttgtctggcagtcaaatctgtcaacttcataacagctccaatcgggaatacagccattgtacgcctaagttctctttctttcatgatggcctcctttcattaaaccattataaactttaaaaagtttgatgtcaactctcatgtgagattttatgacatcaaactataatttgttattttttagttttttccgaagtatttcaatatctgtattaaccatcattgcaataaaaacaccacaaaaagtttcaaaaatacgtgcaaaaacatatagaattgtctctccgcttgggatagataaagttataataagtaatgcggctgttcccccaataatacctgatttattattacaagcaacattaatcatgatacataacatggtacaaataggaacaattaataaagtgacccaaaaagcttgatgaaatatctcattgaatgcaaaaaatactaaggagagtaagccacctatactattaccaataattctagaaaaaccaaagtgcacgcttttatcaaagtcttctcttaaactaaatacagcagttagagcaccaatttgaagccctttccaaccaaataaatgaaaaaccaataaaactaaaaagaccgataagcctgttttaaatgttctcattcccaatttaaactttttaatatcaaacttgtaattagataataatttttttaacgttttcatacctatcccttcactatatattctaacatatcaatccataaaaccctttttgtaaacgttttatttattactagtatatcttttataaaccaatttatatcaaatcgtcataaacttttgaaaattgcagtgtcaaccaaataccactatatctaaaaactagtaaatgataaatgaagtcaaggaaagttcaataactctacattatcaactaaaaaaagacatgcatcagcatgtcctttaatataaattataatgactattatttttcagtcaatgctgccaaacctggtaatactttaccttcgagcaattccatgcttgctccaccaccagtagagatccatgagaatttgtcagcacggccaaggttgatagcagctgctgctgaatcaccaccaccgatgattgatttaacgcctggttgtttaacgatagcgtccattacaccgattgtaccagcttggaagtcagggttttcaaagacacccataggtccgttccatacaactgttttagcaccagtaagtgcttcatcaaatttagcgattgatttaggaccgatgtcaagaccaaggaacccttctgaaactgcttcaccttcagtgtcgcgaacttcagtataaccagcaaatgcgtttgcttcttttgagtcaactggcaagatcaatttaccgtttgatttttcaaggaggtctttagcaacatccaatttgtcttcttctacaagtgagttaccgatttcgataccttgagctttgtagaatgtgtaagtcataccaccaccgataagaactttatcagctttttcaagaaggttttcgataacaccaatcttatcagaaacttttgagccaccaagaatagctacgaatgggcgttctggagtttcaactgcttcttggatgtaagcaatttcgttttcaagaaggaaaccagctacagctttttcaacgtttgctgaaatacctacgtttgatgcatgagcacggtgtgctgtaccaaatgcatcgttaacgaagattccatctccaagtgaagcccagtatttaccaagttcttcgtcattcttagattctttcttaccgtcaacatcttcaaaacgagtgttttcaaccaaaagaacttgtccatcttccaaagcattgattgcttcttctaattttgcaccacgagtaacacctgggaatacaacatcttgaccaagtttagcagctaaatcagcagctaccggtgcaagtgattttccttctttgtcagcttcttctttaacacgtccaaggtgagagaagaggatagcacgaccaccttgttcgatgatatacttgattgttggaagagccgcagtgatacggttgtcgttagtgataacgccgtctttcaaaggcacattaaagtcaacacgaacgaggacttttttacctttcaaatcaacgtctttaacagtcaatttagccattagtaaaactccttatataatttgatattatttattataacatatttttgtgaacagttgtaattattgattactttttcacaaatagatttcatagattttcctagttgttttcaagagaattcgtatacttattaatcatacgaatgcaacattttttgtcgttctttcaattgtttttgaacatccagatgttttccttgataaatagcactttcccaagaaccgtacataggatttgggaaaacaataaatttactaccaaactcactttgaagtttagttagtagttgttctctatctgtactagatgatttagaaaaatcagcaaaatcaactaaattatctccaaaaagcataattaaattggtatctttttgaactgcctgacggcgactctctttagatttcattccttttttaaggaaaagcaagtggtctttcccttgaacaggtataccttccttctctaaattttctttagtcgcatcaacttgagcatctgtacgatctgagacataataaatttttattcccttttcattagcatacttcaaaaattctttggcacccgcaacagccttagctgatttcttttgcacccatttatcccaactctctggcgtgaaactagagccatctttaatattctttgcttgatatgggctattatctaaaactgtttcatctaaatctaagataattgaatatggtttttcactgggcttttgtaaccaatcatctaacttcattttagcaacattataaccttgtaaatataaagccttggcttctgcagaattttgataccaaaggacagacatagtgttttccttagccaacagtttattagaacttagagaaatatttttaaatttcgtcttttgctccaccttatctggagacatatcagcttttttagtactgtggtttgactgacatgctgtcatcataaatacagcaacagataacgataaaactgaaaaaacttttgtagtcttcataaaacttctcctctatattttttcaattaaatcataccactgcttactttcaaaatcaaaccttattttaacttatagtcaatataattcatttttcatttattttctgataattttctataataaaatgaaaaaacattcgtattattttttatttataaaaataaaagagggataaatccctcttttacatcatattaattaaaaattattttgcaatttttgcaaagtattcaagtgtacgaacaagttgtgaagtgtatgacatttcgttatcgtaccatgaaacaactttaaccaattggttaccgtcaacagtttgaactttagtttgagtagcatcaaacaatgaaccgtatgaaataccaacgatatcagatgatacgattggatcttcagtataaccgtatgaatcgttagctgctgctttcatagctgcatttacttcttcgacagttacgtctttttcaagagttgcaaccaattcagttactgatccagttggaacaggaacacgttgtgcagcaccatcaagtttaccgttcaattctgggataacaagtccgatagcttttgcagcaccagttgagttaggaacgatgtttgcagcacctgcacgagcacgacgaaggtcaccaccacggtgtggtccgtcaaggatcatttggtcaccagtgtatgcgtggatagtagtcatcaaaccttgtttaacaccaaagttgtcttgtaaagctttagccattggagcaagacagtttgtagtacatgaagcacctgagataactgtttcagttccatcaaggatatcgtggttagtgttgaaaacaactgttttaacgtcgtttccaccaggagctgtgataacaacttttttagcaccattttcatggatgtgttgttcagctttttcttttgatgcaaagaaaccagttgcttcaagaacgatttctacgccatcagtagcccagtcaatgtttgctggttcgcgttcagcagaaactttaacaaattgaccgttaacttcgaatccaccttctttaacttcaacagtaccgtcgaaacgaccttgagttgtgtcatatttcaacaagtgtgcaagcatgtttggatctgtaaggtcgttgatacgagtaacttcaacaccttctacgttttggatgcgacggaatgcaagacgaccgatacgaccgaaaccgttaataccaactttaactaccattagtgatttcctccttatgaaaatctcaaatattttattttagggatccccctaaccaatgtgaaaagattaacttgtacatatgtgcaaaaatctttcaacacaattattatatcttttttcgagaaaaattgcaatgaatttaccactttcaaaaagaaaaaaagatactctttcgagtacctttcataagttttcagaaattattcaccagagtttttcttgatgatttcttcttgaactgacttaggaacatcttcgtagtggtcaaataccatcatgaatgtgccacgtccttgtgttgcagaacgaagaactgttgcataaccaaacatttcagcaagtggaacaaaggcacgaacaacttgtgtattaccacgtgcttccataccatcaacacgaccgcgacgtgcagtcacgtgacccataacgtcaccaagattgtcttctggagctgtaattgtaacaagcatcattggctcaaggatagctggttgcgctgatttagcagcttctttaagtgcaagtgatgcagcaatcttgaaggctgtctcagatgagtcaacatcatggtatgaaccatcgtaaagtttagcttttacgtcaaccattggatatccagcaagaacaccgtttgccatagattctacaagtcctttttcaacggctggaataaattcacgaggaaccacaccaccgacgatagcattttcgaattcgaatcctttaccttcttcgtttggtgtaaattcaatccaaacatcaccaaattgacctttaccaccagattggcgtttgaagaatccacgtgcttgtgtagaagcgcggaatgtttcgcggtatgatacttgaggtgcaccaacgtttgcttcaactttgaattcacgtttcatacggtcaacaaggacatcaaggtgaagttcacccattcctgagataactgtttcaccagtttcaacgttagtttcaacgcggaacgttggatcttcttcagcaagtttttgaagggcgatacccattttatcttggtcagctttagattttggctcaaccatcaattggataactggttctggaacttcaattgattcaagaataacttttgatttttcatcagtcaatgaatcacctgtagttgtatctttcaaaccaacagccgctgcgatatccccagcataaacagtttcaatttcttgacgactatttgcgtgcatttgtaagatacgtccgatacgttcacgtttacctttagatgtattcaacacgtatgaacctgaattaagaacacctgagtacacacggaagaatgttaagcgacccacgaaaggatctgtcatgatcttgaaggcaagcgctgcaaatggctcttcatctgaagcaggacgtgtttcttcttcgtcagtatcagggttaatacctttgattgcaggaatatcaagtgggcttggaaggtaatcaataacagcatcaagcatcaattgaacacctttattcttgaaggctgaaccacacaatacagggtagaattcaacattgatagttgctttacgaatagcagccatcaactcttcgttagtgatttcttcaccttcaaggtatttcatcatcaaatcttcatcagtatcagcaactgcttctactaatttttcacgatattcatttgcttgatcaacatactctgctggaatatcttcttcaaggatatctgtaccaaggtcattagtatagatttcagctttcattttgattaagtcaataataccacggaaatcgtcttctgaaccaattggcaattgaattgggtgtgcattcgcttgaagacggtcatgaagtgattgtactgaatagaggaagtcagcaccgattttatccattttattagcaaaaacgatacgtggaactccgtattctgttgcttgacgccaaactgtttcagtttgaggttctacacctgattgagcatcaagaactgttaccgcaccatcaagtacgcgaagtgaacgttgaacttcaattgtgaagtccacgtgtcctggtgtatcgatgatgttaacacggtgaccatcccattgtgctgttgttgcagctgatgtaattgtgataccacgttcttgttcttgttccatccagtccatttgtgaagcaccttcgtgtgtttcaccgattttgtggattttaccagtatagtaaagaatacgctcagttgttgttgttttaccagcatcgacgtgagccatgataccgatattacgagttttttcaagtgaaaattcgcgagccatttggtttctcctatattttaaattatttacttctttattataacactatttataaaaaacggataggcaggacctacccgttctaattgctaacattgctatctaccaaacaatttgtttagtagctatgataagtctcaaaaagagagtaatcttaccaacggaagtgtgcaaaggcacggttagcttcagccattttgtgagtatcttcacgtttcttaactgatgctcctgtgttgtttgcagcatccatgatttcttttgcaagacgatctttcatagtgtgttcaccacgagcacgtgatgcgttaaccaaccaacgaagtcctaaagttgtacgacgttctggacgaacttcgacaggaacttggtagtttgatccaccaacacggcgtgcacgtacctcaaggacaggcatgatgttttccatagctgtttcgaacacttcaagagcatctgttccagtagcttctttaattgcttcaaaagcatcatatacgatagttgcagcagtaccacgtttaccatcaagcattacacggttgataagacgtgtaacgatttttgagttatacaatggatctggcaatacttcgcgtttaggcgcttgatttttacgactcattttctcttatcccccttctaattaccctttaggacgtttagcaccgtatttagaacggccttgtttacgatcagctacacctgcagtatcaagtgcaccacgaacgatatggtaacgtacccctggaaggtcttttacacgtccaccacggataagcacaacactgtgttcttgcaagttgtgtccgatacctggaatgtaagcagtaacttcaataaggttgctcaaacgtacacgagcaaatttacgaagggcagagttaggttttttaggtgtcatagttccaacacgagttgcaacaccacgtttttgtggtgcagataatttagtgtgaacttttctgtgactgttgtaaccaatattcaaagcaggtgaatctgatttttcaactttagatttacgtggtttacgtaccaactggttaattgtaggcatctacatttctcctgtaagttttttatttttggttgatatagcacttggtgacagcctatatctgcgtgtacttttgcaacaattgtcagcacgtctctgtacacttttgagagaccaaaagtaaaagtaccgtttatcatagtatcattttacacataatgtgtcaagcttttattacttttacaagcaaaaagaatcaaggatgtcaccttgactctttaatcaaatatattccccgcttctacagagactctattattttttacatcaatttcagatactctcagaagagatttataggccatcttctcacgttgttcctgagcattttctgcaaatacagcgacacctactaatgtgctatcgaattctgagagtaaactaatcatccccgaaacagtacctccacctttcaagaaatcatcaactattaaaactcgactgttaggttttaagctacgcttagaaagaaacattttttcaatacggccacttgaaccactagcgtagtttactgacacagtagaaccttccgtaatcttcaaatcacgtctcacaataacaaaaggaacatctaaaacatttgctactgcgtttgctaaaggaacaccttttgttgcaaccgtcatgacagcatcaattttttgacctctgtaagcgttcgctataatgcgaccaatactttgtaacatttttggtgtactgagtagatctgaaagataaatgtaacctcccggaagaatacgatcgttttcagataaacgctgtcttaattcttcaacgatttctttcgcttctgcttcagcaatagttggtgtaaagataacacctccacttgcaccagtcacagttttaatatctccgatttgagcttgttcaaaagcttttttgataatagcaatatcttctgaaatcgaagatttcgcggcaccgtatttactagcaaatgtatttaaactagttaatgtatagggattatttattaggtaatttgaaataacaaccatgcgttcgctacgtcttaatttcatattttctccttattcatagcattctttacatatagtataacataacaaatgctaaaaacgaacattttattttaggtcttaattattctacctaaattatttaatgttcggtttataaaaagaacggttatccatggcaaaaatgcgatttgtcatttcaccttcgttgacacggtttaaagctgttgtcatcatcatcatatttgcatcaatgttatcgatcatatggataatttctgcctccatgattctaggacgaaccgggcttccatattctaattgtccatgatgactcagaataacatggcgtaacactgtaacctcttcttttgtatcatcaatattaagctctgctagtatttttgttaattcctcatcaataagtgaaatatgaccgataagattacctcgaatagtatattctgtattatcaggacccgataactcaatgaccttggctaaatcatgtagcataataccagcaaacatcaaacttttattaagttctggatagatatctccgatactatctgccaaacgaaccattgttgccgtgtgatatgccaatcctgattcaaaagcgtggtggtttgttttggcggctggataggtaaaaaattccttattgtatttacgataaagtgctcttaccacacgctgccaggttgcattttcaattttaaagagcatttgttccatgtactctctcacgttgtcaacattgattggaggtttttctttaaaatctctaggatcattaggttcaccatctttgatgtttcttaatgtaatttggttgacttggggagttccattataaacttcacgacgccctttcatatgaacaattttaccggctacaaactcttctacattataggtctgtgcatcccacatatttcctgaaatttcgccagtatcatcttgaaaggtaaaggcaataaagtctttacctgcacgcgttttacgaacttctgctttctttataaggtaaaacccctcaaaaagctcgtcttttttcatttggttaattttcattaatttcctcttcttctgttataggaaggtttaacaagctagtggttgcttgatcttgatgttcttcaactgtatttaagactctgataatagcgtttgtccgcgttgtgagtaaactatcaatacttttacttgctgtatttaattgtttttgagcttttgataacatgccaccaaattttccaaattcaaccttgacattccctaaaattttactaatatcattagcattcttttgaatatttaaggttttaaagccaacagataatgaatttagtaaagcagataaggttgacggtccagctactacaatattttcgtcacgtcttagactatcaaagaatgttgcatttcttaccacttcagaatagagcccttcagttggtaagaacatgataccaaaatttgtcgtttcaggaggatttaagtacttattgtttatatcttttgcaaatttacgaatacttgccagtaaagatttacgatagagttctatttgaaccttgtcacccaattcataagcatcttccaatcggtaataatcttctagaggaaacttagagtcaataggcaaatagatataatctccctgaccatttccaggtaatttaatagcatattcaacacgctcagaagagccagacaccgtaggaaattctctctcatattgactaactgtcataatatcttctataatttggccgagttgtaactcccctaatattccccttgtcttagtatttgacaagactttgttcagtgtaccaacatcttgggcaacagttttcatctccccaagaccttgattgacgctctctagttgacgcgatacagtttcaaaagaagtttgcaaacgcgtttgtagcgttttttctagcttttcctcaacagtttggcgcatttgatccaagcgtttttcattggaatcttgcattttctgaactgactgagataaattggagttaatcaattccaagcgtttgtctgatcgatctcgactctccgttaaatgctgatttaattctgtacgcatatcggtaagcaactgataaatttcctgttgcatacggtttagctgattagtcaacgttagaatttgatctttttgcgccacttctatctgatatgtcagttggtctgatagattatcagcattatcttcaagttgtttttcaacggactttgttaattccgtcattttttggtaagaaattatcgtcactgtcagactagctagtacaatgatcaaaatgatgacaagcatattaacctctatccttactataaataatgattaagtaaccatctttgagctctacttcaattggcgaagtcataaattcattactggaatacatttttttcttaaaataattacttttgttcaattcatatttagccccagaaatctgcaaagtagactcactctcaggcatgaacgagacataggacatcccttcaatccttgagacttgatttttcccggatggtagataagtcactatgttttgttcatctttgagtctgatttgtgacataaatggttctagatctctgtcacttggtaaaaagatattagacatcatatggtcaatcctgccaccaaatgctccaaatacggtcacctgagcttctggaaattctttgaaaatagtttttaaagctaattctgtatctgtatcatttttttctgcactagcagaaacgatattgctacaatagtgtttgatataaagcagttcatcttctgttatagaatcaaaatcacccactgccatgtccaaagaaagcccattttttaataaaaataggcttccacggtcaattccgacaaaatagtcaaaatcatattcaaaataagttaagtcaccgccagcaaataaagcaattttagtcatcgagcgccacccttaaggtttctacttgtgcaggtaaatcacttgctttaaagagataagaacctgcaacaaagacatttgcaccagcctctgctgctgccttaattgtagtattatctataccgccatcaacttcaatatcataatgatgaccgtactctttgcgccatgctgcaactgtctttacttttgacatcatttctggaataaaggcttgtccaccaaagccaggattaacagtcataattaaaatctggtcaaccaaatctaagataggaataagagattctacgggtgttcctgggttaataaccacacctgctttcattcctgcctcttttatcttttgaagcgcaccatgtatatgtttcgttgcttcaacatgaatggtcatgatatcagcaccagcttgagcaaaagcctcaatataacgttctggatcaacaaccatcagatgacaatcaaaaacaagtttactgtgtttacgcatgctggatacaacatccgcaccaaaactaatattagggacaaattgaccatccatgatatcaatatgaacgtattctgctgttgtctcttcaatacgtttcaattcgttagcaaaattagcatagtctgctgctaatatcgatggggcaattttattggttgacatagaaacctactttcttttaataactttcttatatgtttcacgacggctctcaatttcacttaaaaattggaggtagttatcatagcggacttgccataactgaccttgagttaaggcttcttttacagcacatttaggctcatgtgtatgcgtacacgagcggaatttacaaaaatgactaagtctacgaagctctggaaaggattcgtttaagtcctctgcattatccacttcatagtccaaagaagaaaaaccaggagtgtctgcaatttttcctttatgaacgttatagaaactaactgctcttgtggtgtgtcggccacggcctaaactacccgaaatttcaccagtttcaagtttcaactcaggagcaattttgttgagaagcgttgattttccgacacctgtctggcccataaaaacagtcactttatttgctaacagaggcaagagttcctcttgagaataacagaaaacgtagcctatattctgataatgttcgcgaatatcatcaataacaaccaaatcgtctaacaaatccaacttggaaatataaatgataggctgaatcatcttatattctagaagtactaagaaccggtctaataagttagcgttaaaatcaggttctttagcagacatgataacgacagcttgatcaatattaacaataggtggtcgtacgaggctatttttacgctcttcaattgatagaatatatccttctgattgatcttgcgaagaaaattcaacccaatccccaacgtagggaatttgacctttttttctaaaatttccacgcgcacgtgtctgataaacaacaccgtcagattccacataataaaaacctgctagcgacttgacaattctaccttgcaattgttctccttaattgtttagaataccactattatatcataaaatgagaaataagctctactctcagagataagctaaatagaaactatttgtaggtgttcgatttctctcaaataacctcaattttatgaattcccaacataaaagcagtgatcttatttagatacactgcgcttttttccaattactattaaggcacctactgtaatttctgatatactcgcccaatcaatagtcgttttatctacgctgaataacaacggtgtcatatcaataaaagcttgacgttcttgttgagaacagttatagctttgaacaactttctgctcagaaataatttcaaaattttctctaaagtgatctagaattttttgattagagtaatctttctgtttcaagtattgactagctttttctcgcaattcttgaacatgttcagctacaggaacaacctttacaaggataccatcatcactcagcacccgcctaaattctttataatttgcaggagaaaaaatgtctaaaatgatatcaattgatgagtcttgaataggaaggttagctaaatcagaaacaaaccatttcacaagcctagactgatcacttttagcagctaattgaatcgaatctttagaaatatcaaaagccaagaaagtcttctcatgcttgttaactaattgacgagaataaaagccctctccacaaccaatatctaaaaccgaatgaaactgagaattattttccaaaacctttgaaatagcttctaaaatatgattataatacccgttttctaagacaagctgccgattttcaaatgattttttatcataatgttcatctaccttctttcctccaagaagattaacatatccaaatttggataaatcaaaacaatgattatcagagcatttgaggctattactttcttttatcaagggattttgacatttaggacaagcgaaataacttgcactatcttcaaaacgccacttcttgtcaaccaacatagtttatatcccaacctctttcaaggcatctgctaaacttgcaaaatcagggatagataaggcttctccgcgaatagatggcttaatttttgctatttctaatgctttttccaattttgctttagtatcttctgattttccaaaatgactcgttagattattccaaagtgttttacgacgatgtacgaaggctacttttgacactctgaaaaagaaatcctcatcttgaacactcactactggttgatctctacggaccattttcaaaatagctgaatctacatttggagcaggaacaaaaacagttctcggaacgataaatgatactttggcagtcatataatactgcactgcgattgacaaagaaccgtatgctttagtatttggcatagctgaaatacgatctgccacttctttttgtatcatgaccacaaactccgcaaaaggaatcttgctctcaatcaagtgcataaggattggtgttgtgatgtagtaaggtaggtttgcgaccaccttgataggcagatcaggattcttgaaagcctgaatctgggtctgcaaatcagccttgaggatatcctgattgaccacttggacattgtcaaaacgcgcaagcgtatcagcaaggataggaatgagacgatcatcaatctcaaaagccataacctcagctgcattctcagccaaaaactctgtcaaagccccgataccaggaccaatctcaatcacgttgacacccttgtcaatctctgccgtgtcaacaatcttctgtaaaatattagtatcggtcaaaaagttctgaccgaatgatttcttaaatgtaaacccatgacgctccaaaatagcgcgggtaacggttttatctgcgattctcataattcctctatttcttaatattgatcatttttgaaataacatttgaggctatttgtgatattacaactggattataccactacttccttttgcctttactattctgagttataaacttatttttaattgcagttgcacaagcttcggttagtggtcctcctattgcttgcttataattaaatccaatcaactgcattgtttttaaagtatctttattcaataatgtaaccaattgtttcattgttcgttcctgttcctcatttagaccagaaaaattatataacaatgagattccttgctcgagagtattggatagatattcaatatcctcatcatctatattaattttttcatactcttctttatatgactgtgcaatgcgaattgcttgctcccgttcagctaataattcgttaattaaatcatcataagtagctctcaatgttgcagcatcttttacatcctttattgattgaattttactggttaccatagttgcagtccctttgactgcaagcgttgctaaatctaccccagctctagtcaatgcttccgttacattatactccactatttttctccttttctattaatacccctccatacactcttcaacttctgccttggtcactccgaagagtctgaggcgtttgaggagttgtttaccatttgagtagccgatacggagttgattcccaagatactcacggcgttttcggctatcgctagcagtaatgaatccccaacgaatgaggtctgcttgggtgatatcgaaatgatcttcatcatcgaaatgctgagtcacttttgagagtgccttctgcaaatcttcaaagctggcatgctcgacacccagagatcgtcccttggtctttgagcctggctttgcctcgtctcgattgaggaaggcatggcggactgtcggaatggcattcatgatgattttacggatacgctcgccattataatctgggtctgtaaagacgataactccccgcaaattgtgcaaacgttcgatacgctctaaatcatcttcatcaattgctgaacctctagtttcataggtatcaacattgtaaaagcgtcgcagattagcagtatcatctttcccttcgacaacgatcacttcttgaatatcaatttttttcatcaagtctaaatatccttactgcattttggtatgtagcctccgctacctcttccacagttatgcctcgtagctctgctattttttcaacgacatatctcgtataagcggttttgttttctcgacctcttttaggtacaggagccaaataaggagcatctgtttccactaatatcttatctaatggcaactctcgtgcagcttcttgtacatctaatgccttcttaaaggtcacaacaccagaaaaggaaatcatcatccctaaatcaataaatttctgagccatttccaaagaaccagaaaaagagtgcattataccaccaaaaggcccaactccagattccttaatgacttcataagtgtcttctaacgcatcacgtgtatgaacgacaaaaggaaggttatactcttttgaaagttcaatttgacgcttaaacacctcgatctgaatatctttgggatcctccatccaataataatccagaccaatttcaccaagtgcaataaccttgggattttctaaatgactgataatcattgactcaatattatcatcataagaaccagcttcagttggatgccatcctattgtgctatatacctgtgcatattgggaagataattccaaagattttgaaatggtatcttggtcaaagccgacaacattcatttttgtaacaccgagttcgctagctaaattaatttcctcgtctatctttccttcaaaattttctacgttaaggtgggtatgggtatcaaatatttttatcatatcatcgttctttctttgcttatcgtagctacaagcattaatctttattattataacataagactgaagcattctgatcagaaagagtaaatcaaaaaagtcaaaacatttttgctctgacttttgaatacttgctgtaaaaatcctctacaagtgtctagctaatggtagagaaactagactataaatgattatatttttgctgattgctttcaatagcctcctcaacctttgaacgaaattctccttttattgcctcgtccaattgattagcaactttatgaatagctgtctttgtgttgatggctacttcgtctatttctttatgatgcgacgtaataatatcgtgaaacttagatctcttgcgtggcgcgtacacgctatgtatcaattctttatccaattgtttttttaaagtccttactgactccttaccagtcaggacatcccacattaaactcaataatttctcctacttcattaattctcttttcttttccctttgcaactcttcaaaggttagttcatgttctgaacgttgccgaatatagttagctctatattcttcttcttgagcggacaaggcatagtactctttatggtaagcttgctctaagtcgtcatgataagaatctaaaatacgattgagcgtcatcatatctgagctatcattactatatctcaaatcatattcaacagcgtcgtaagtttcttgaagcatattaataatcttattttttcttactgagagatcgtctaatttttcttcaaactggcaacaactatggtgataggcatcatctaaatctgatatttttctctgagtatcagctaattgtttttcaatgatatcaatcagtgccattgtttaaactcccctgacaagttactatcttgtcgcaacatagcttcaactcctttattaatttggttttctaattcaacgtaagcgtgagaaatgctttctgccgcttgagttttatttgagaaaaaggtttgagcttctccgacaatgctcgcatagctaacacctgactgagcatacgcttcttccaattcttgaggacttagttcagtaactcctgtaggagctacttttaaagattgataaagctcttctgctttagcaactgctttttgctcaacttttttaacttcttcaactgcttcttttgatatcgttaccaaaccactagagatcacttttgcttgttgactatctaggaaaatagcttgattcttactaacttcttttcccgtacttttaaagctactaagtttcgctttaatagcatgcattctttgattcacattcgtatgaactactgaatagttttctttgtaagcaaatttatcttctgctaattttaaagaaccatctggattgtactggtagcctccccaaatatgctgattggtaaaattagcaacccagctacctcctgaaacagctttactgtcaactattttaacaattccgacagcattatcgcttccttctttaggataacctattccaattttatccttggaatcaacgtaattattgaccaccccttttattttatcaacctgttctttttgtttatctgtcaaaatactataaaggtttggaccgttatatatccaagctccttgaactcggtaaatttgattatcatccaattctgcaatagcatactgtgcattcattgaccctaacgagtgtccgtagaccgaaatttttgcgttaggatatttattcataacttcttttagcagatgagctgattgttctaactgctttgtaccttgtttatgagatacactttgtgaaccaaatttctttaataatagtttactagctattggaatatcatttttaaaccagtctgttttccaatcatcccctccaaacggtgctgttgaccccttaaataaaaccgtaacttccttaacatcctctggcttgtctaaagttccatttggagtgatggtataaatttgttccccggtttctttgcctccatcttgaacgtgagcaactttaccgatggggagtaccttatcttggctcattattttgactagtgtatcaagttggctacctaattcatactcttgcttcgctatatttaccctatctaaatcagtcaagactttttccattaatgacctctactttccaataaatgagttaactggggagattgatggctactttgactgaccaaatgcccttgattatccctatccaaattacaagtaatatataagttaggatctttattaatgattaaccttaccgaaatccctcccataggattttttttgatactttctttgtcaatatcatacgacttaataacagcattctctttgaaagcatcttcatcttctgcataaatccacttttgataagcatttttagcgtctttgctattagctatttcccataattcttgttgtttattgttttcagtcacttttaaacctcctacagtgaaaccaagccctaaaaggattattacaataaaactaagtaattttattgacttcatctctcctccttttatcatataacactcatttgatatctagtttatcataaatttattctcattataaatgaaaaactataaaacatggattagttatcttaggattaccaaatacaaagatattaaaaaagatgattaatagctctaatgctataaatcatctgactctactatttacttgtaatcacttggacgtcctgtatattttgcccaagatttcttcaaaaatttattattaatgtgataattcggcttgctgttttcctctgttaaaaatggattgatatgcttatctagctctaaccaaccattccaacctaaatggattgtatcttgcataaagtatggcttacctccatctcgagaaaggtcagcgatatgattgaaaccttgactttgaagttggtgttttattttttctacagatttttgatacattttttgatcaagccctgtgtagtctgtccactttttatttactggtggtatgacaaaaaggacatctgtattttgttttgagaattcattaagaaccaactgtaaatcattaaattctggtgacttagtataattgaaatgtcgttgtgaccctttcaatttttttaagtgctttttaattcttgtttggtaaaagcgatcatcaataccaaattgatttgatctcgttgctactttagcatcttgtgatgcaatacgcgataaatgattatatgagaatgctttcggtaatttaccaacatgaggcattattgcctgattataagtttttcctagtggtagatagctaaaaatagcatctgtcttctcaaatacccaatcattaaactttagtctttgtttgtctttatttgatagtttttggccatctgcaactttttctatcaaatctgacatagaagcttcaggatataattttaacaatcgacgagcagcatacctatcgtaggttgtccctgtttgattttgcaaaaatcgaatggtttgatcgttgctgaaatagttttgaaaagcacctttgttggctcccttgcgaacaaaccattgcggagaaataacatagatagcttttttatttttgatttgtcctttaatctgttgaatgccatagtattgtgtcagagaagccgcccctttttgacctaaaagatatgggatataagacctattgtaagcctctgctaaaactgatggatgcattgcgtcaaatcttagccactcacttgaaccaaagaaagggacaaaattggctttaggatcactgaaagctctaactttttgaactctgcttttaaaacctgccttcgtcaacgctactgcactgtttttttccttacctaaatgatgaggctgagaaacaggaaaaacaaaatataatcctaccaacaatagtaaagcacaaactagaggtccaaatactttacctagacgtttaagcattgcagagctccgttactccagcaacaattttattagctgtgttccagtcattacgaccaaattccgcaatcggaatatcaatattaaagtggctttccaactcaacaattagttcaacagtacccatgctgtctagaactcctgcgtcaaataagtcttcatccatcatagaagaaacatcctccataaataggtcatcaataattgctaatacttctgatttaatatccattataatactccttattatttgttatgcggttgtgggaaccacaaaagatctaaaaatcctgaaaaaatcaagaaagaaaacataactacattaaaggtgatgaagacacccaaagcataagtccatttgttttctggtaaaagtggttttttagccaatcttctttctttattaatatttttcttcttacgtacccaagcgtcattaataactaggccaatcccatgaaagagaccataggctatatagtaccaagttaacccatgccagaatcccataagaagcatattgataatataagctacacttgaagtaacattacggtttttaaaaactttatttttaactaaaagcttaacaagcctcatgaaaacaaagtctctaaaccagaaagaaaggctcatatgccatctattccaaaattcttttaggtcgcgtgatttgaaaggtttgtcaaagttaatcggagacttaatccccattaggttagaaatagccaacgcaaacattgtgtaacctgcaaaatcaaagaacaaatcaaaaccaaaggcatacataaccccaagtgttggccaattaaacacaccaccctgttctagcgctaattcttttagaggaggcataatcagacttccaaaaatataggctaaaataaacttatagagaaaacctaacatcaaataatgaatcgcttgacctaacatatctaggagttcgtttcgatctgggatattaatgtaatcctcattgaatcgtttaaaacgatcaattggtccacttgagaaagttggaaagaagagtaaaaatcttaagaattcccataaagtaaattctttcaagacaccgtctctcatttcaataatcatagcaacagctctaaaagtaaggtaagaaattcctagaaacccaaaaagtgactgatgcccatcctcagatatagctggaattaattttaccaaaaatagcggaaaaatagataaacaaaccgttacataaaagaccaaagtatgattaaatcgtttccggtaagctttatagataaaaactagcagagactgtccgacaacgtatgccaatagtgacttcaattgattaaaagtactaccagtcaacatcattacaataaaacttagactaaaaataatctcatataaggcaaaacgcttcttaaagaataagccgatgtaaattggtaggacagctaagataaggtagaagaaatattgtggattcccataaacatccaagtgaggaagtttttctaaaaatgcctgtatcacttgtttacctcgctcataagacctttgatatcaattttcccatttggtgtcaaaggtaaatcctctcgatagataaatttagatggcatcatgtaatccatcataatgtcctttaagtcttccttaattgcttttgtcaaatccaaatcacgttcaaaatcatctcttacaccttcttttaagacaatataggctaataagttttgaactttatgatccttgttataacgtggcactgctactgctgattttacatactgcgatttgtttaagttttgagaaacatcttctaattcaatacgatagccgttaaatttaatttggaaatccatacgcccaccgtaaagcagaagaccttcatcggtcatacttcctaagtcaccggtatggtaagcaggtagaccttcgaattggaaaaatgcctcagctgtcttttctggattgttaagatagccttttgatactgctggtccagcaataatgatttcaccttgctctccgtttggtaatttatgaccttcttcatcaatcacatacgttggtgagtcatctttagtgtaaccaattggaaggcgtttgcatgtttctaacatttcatcagtaattgctactgcggatagagcaactgttgcttctgttggcccatatgcattaacgatacgagcttttggaaaacgttgacgaagtttttgtgcagtcttgacagttaactcttccccatcaaaataaaaatgtgttaactgtggcaaggtctctgaattgaaatcgttagatagtagcgccatatcagcaaatgatggtgtcgaagtccaaacctgtattggcaattcattaatggtagcgaatagttttttgaaatcattaactactgtctttggtagggcaaacagggtgcctcccatagctagtgttggtgcccaatacataactgataagtcaaatgaatatggcggttgagccaacatttgcggtctttcaggaactgaaaactcatcatcagaaatcatccaatttgtaaagctcaataaattgtcatgtgaaatttgcacaccttttggtaaaccagtagtccctgaagtgaaaataatatagtaattatcatcacctttaacagaatgtgttacctcataaggagtcttttcttcaaaaatagctgaaacttgagaaacgtctaggattgggacattatcaacttcaagaggaaattcaccaattgaaatgataaggcttggttgagcaactgtcataatagcctgtattctatccaaagcagagtgttggtcaaccggtatataagcatgccctgactttgttaaagcaacaaatgtcgccaacatttcatattcttgaccaccgaatactaagacaggtgatttttcaacaaggcctaggctatcaatatgagcagctagagagtcagagtctactttaagttgtccataagtatggacttcccctaaaatatcatacactggaaaatcagcttgtgtctcagcaaaatgctcaattgttttaatcatatcatgtatcatttgtaccatctcctagaattcattataaataaaactgccttgtccgcgactaaggtatgcaaaaaagtaaattagtaacaataaaataccgaagtataataacgttctaccaataaaagataaatatggtttcatcattcttcctttaattaatcatggtattggtccaaaatccatcaattggtaactggacttcaagacgtaattggtctttttcttgatatgctctaattctccccttatggcgttccacgattgctttagcaatagataagcctagaccaaaactgagagaatctgcatgatcatctttagcttgataaaaacgctcaaagagattatccataacctctttggaatagatagcacttggatttgatattgtcagaatagcttttcttcgagcttgtttaagactaaactggattgctgattttgacaaagaatgcctaatagcattatccaaaagaattattaaaatttgcttaatctgactctcttctccaacaatccagacatcatcttcaatcgtatcatttaaacacttttcttcttcatatgccaaactttcatatgttagaagtacttcttgacataagacagataagtttaactttttgaaatttaccttggagcgtttttcatcaagtctagacaaattaagcaaatcttcaattaaaaactccattcgcttagtctccgaaacaacatgatccagataacgattccctggaatttgctgttccagaacctgaacgttggctcgtatagctgcaataggggtcttcagctcatgactcgcatctgaaacgaactgtttttcgcgagtcatttctgtctctacaggtcctacaataaatcgagaaagataaagacttacagctgctaataaacaaaatccaaaaatagtaaaaacaagaattagaaaacgccttgcataagggacttcataactagccaaatccataatagctatggtgtaggttttatctttatattcttttatggaatatataaaagacttccattttcgtgacttctttccttgctcaaggagcttcaaactagatttttcgataacatcatttgtcaaatcagtattattgctttgaatcttaaccatcttttggttatctatagtcaccaaagcaatcggttcatcgcctggtattcctaaataatcatttttggcaactaatttaacaatcctatatgcatcatattcatcccaatattgattgtagcgattactaactgcaaatagaaagagaacaacgacaataaggattgacatggtcaaaaagacaaattttttgcgtaaatcactaaacattatgtcctctcctccaaggaatatccaaagcccttagtggttattatttcaatgtctgcttttaaaaagcgcaatttttttcgcaaaaaagaaataaatacttctaactggttatattctgaattgtctgaaggtccccaaaccttagaaatcaactgatttttaggaataatctgctttgcatttcgcataaaaacttccatcaagagaaattctttattggataattttacactactttctttagattctagctcatgtgaatctgtgttaagccttatatttccaagccgcaattgatttgctctgattagagaagattgtctggttctcagcctaattctagctagcaattcatctgcttcaaagggttttgtgatataatcatctgcccctaaatctaaaccattaactttatcataagtctgtgattttgcagttaaaaagattattggggtttctaaaccagcttccctcactctttttaaaacagataatcctgagcgtttgggtaacataatatccaacaggactaaatcatagagacctgtcaaaatgtattctaacccatcatctccatcaaatgctaaatcaacagaataacctttatctgccaataaagcctgaatagcctctgctatacttttttcatcctcaactacaagaagtctcattttctagtcaccttaccatatatattatagtataaactagcaaaattgaaataaccttgaaaaaacgatattaataaaagtatttcctaagtcactaaactacttcaataatacaagcgtctaaaaaataaaatatcactcgctataaagatatttctcaataagaaatctcctcatattttaacaaaaataggggctatttgtctacgaatttccgcattataaactcacttttcattaactttatctataatatactcaaactactctcacaaaaacctttatcgttatgaaggtaccaaaaaagccaccagactcgagtacctgttggcttgatattattttgctatctatattaagctgataacactttacgtcctttacgacggcggctagcaagcacgcgacgtccgtttttagttgacatacggtgacggaatccgtgtttacgttggcgacggattttacttggttgataagtacgtttcacgttgaatacctcctgatagattttcgtattcgtttagccggctattttgatcagttactaaacataccatactattttataacaattttaggcctcttgtcaagaaatactttcaagttcatttgtcttttttcagtaaatagttccatttgttagcaagaaatgcttctctattttctccaactaaaagaaaagatgtgccatcaaaacaataataggtaatgaaataattgttctctctataaaaatgataaataattctagaatgttgatagggatcttggaacctaatatcaccgcaccagtctcagacatataaattaattgcacaatagaaactgttgcgacaataaatcttgtcatctcactgtgaatttcagccgccattatcgaaggaacaaccatatctgaaaaaccaacaatcatggtttgactcgcaatatctgcttctggaatccctaaaagttcaaggaacggaaggaatggtgtacctaaaattttaaaaataggtgttgatactgaaataatcaaagctattgttccgacagtcataattgttggcataacgccaaaccataaactaagtactgtcttagaggcattattgacaaaagtcttcatgtttccatttgcttttgatttatcgatggcaagcttaagtccccactctatcttgttataaccatccggaattacctcagatgtttctttctttggtttagtgtaataactatttgattgacgagataagggagggatataagggataatgaatgcacagacaacactgctaatgatgactgttagataaaaatggccaaaataatcagttaagccaacattctgcaaaacaacaagacaaaaagtgattgatactgctgaaaaagtagtggaaatcgttgcagcttctctactggtataataaccctcaacatactgcttatcggtcaaagcaattccaatagtaccatcacctacaaatgaggctacacaattaactgctgaccgaccaggtagctgaaagaatggacgcataatgggagttaggaagacaccaacaaactccagtagaccaaattctgtcaaaaatggaagaataaaacccgcagcaaggaaaatggtaaacaaaccaccaatcaaatcaaaaaggataaggccgcctgtctctttcccccataccatttcaggaccaatatgtaaaaccgtcatcagaccaagtgccaaaccgatcaaacgaataatcagccagaaaatggtaatgtcagaaatttcttttagcaagtcatttttttcaataaagctaggtctaaacagacgataacaaagtgctaacacacatgaaataaaaatgattagtaaaataatataatgtataggaaaaacagcgttaatccattgattaattgtcttagagattacagagacagctactgttgtcataccattatatttaaatggagtcattaataataatactccaaataacgacggaataataaaccacaagatatctttaatagatatactttcttttttcatacaatcctcctggataatatggaattgtttctaaatatactcataacttccattgtaaaattttataataaaaaaaacaaccttgaattaaagaaaattttacttagtaatactttagtaatttctcaaagtaagttccgtctgccctccaaaaccggaagttagtgtgaaaaggatttttatggtggaattaagtctgagacgtttgggttagaaatgagtttatccatcatgacaaaacacaaacacctaactctcttagaccgtaatgacatccaatctggtttggatagaggagaaacctttaaagccatcgggcttaatctactgaaacaccctactactatcgcaaaagaagtcaaacgaaataagcaactaagagaatcaaccaaagactgcctagactgtccgctactaagaaaagctccctatgtttgtaatgggtgtccaaagaggaggatcaactgtggttacaagaagaccttctatcttgctaagcaagctcaaagaaactatgaaaaacttttagttgaatctagagaaggaatccctttgaacaaagagaccttctggaaaatagatagagtgctttctaatggggtcaagaagggccaacgtatctatcatatcctcaaaaccaacgatctagaagtgagttcttcaaccgtttatcgacacatcaagaaaggctacctatccatcacaccaatcgacctacccagagctgtgaagttcaaaaaaaggcgaaagagcacactccctcctattccaaaagcgattaaagaagggcgacggtacgaggattttatagaacacatgaaccaatcagagctgaactcctggcttgaaatggacacggttattggacggattggtggaaaggtccttctcaccttcaatgtcgccttctgtaacttcatctttgccaaactgatggattctaagacagctatcgaaactgctaaacacatacaggtcattaagaggacactctatgataacaagagagacttcttcgaactctttcctgttatcctaacggataatggtggggaattcgctagagtggatgatattgagatagatgtttgtggacagtctcaactcttcttttgtgaccctaatcggtctgaccagaaagcaagaatcgagaagaatcataccctcgtgagagacatactgcctaaggggacttccttcgacaacttgactcaagaggacattaatctggcactatctcatatcaacagcgttaagagacaggctctaaatggtaaaacggcttatgagctattctcttttacttacggaaaagacatcgcaagtatactcggtattgaggaaattactgcggaagacgtctgccaatctcccaaactattaaaagacaaaatctaacctaatcaactaactgatacaacctaaacgtctcacactaacttcaaccatagcggaacttaatctgaaacgctttcagatgaggatgttttcttgtaccctttttttgcgatttttaactctgaaaacctatgaaatcaagtattataaaaaccaacggaacttagtctgagacggattttcgttggtttttattggtttttatcagactaaattccatttctactagaggtggaacttactttgagaatttagcttagtaatactttataacctgccatttctttcattctctcacttttgatgtattaaaataatataaaacttatattaaatagctaaaacgacttaagtcacattaaaaaacacgctctaaaagagacgtgtttttttctatactatttagtccactctgaaacttcttttttgtggtttttaatccatttttgagctgctttagcaggctccatacctttatccatatctaacatgatagattccatatcttctttagtccacttgaacttatcgataattttatatacttttggcatatcttttttcaaattcttgcgtgctattgtattgatatgttcttcaccaccaaatgatttcttaggatctttaaggtattttaaatcatacttagcaaacatccagtgaggtgaccaacctgtaatgactacttgatctttgtttttgatagccttccctaaggttgttgtcatagctcctgttgatgctgataacaacttccaacttgaaaggtttggataatctttaagggattgtttagcagacttcataatacctgcacctggttcgatacctgtaatttgtttatctgcttgatttgataattcttcaatactatttacgttcatgtatttaggaacaactaaacctattttgacgttctcaacgtgaggacctaagtcatctaaactatttttgtatttattaaaatattgcccgtgggtctttggtaaccaagcacttgttgtaaaatcagcattcccattggcgactgtttgccacatgaccgcattgtcaagtggtgtcaattcaacatcatatcctttagattttaaaacttcagcaataacgttggttgaagcaacttctgaatcccattggacataagctatcttcactttttgacctttggcttcatttcctgaagtcatattgacaacaatgcgaccaagagctgctagaatgaagagagccagggcccctaaacctacccattttttaacttttgatgttttagcttgcttctcacccggtttggaattaaagaattgactaacacggtctaacacgattgctaaaataactagcgatagaccactaacaaatcctgtaccaatatcagcatgttgaagcgccgataacacctcacgaccaagtccaggtgcaccgatcatagatcctgtaaccaccatagaaagagccaacatcatagtttgattgattcctgccataatagtgttcttagcaagtggtagttcaactttgaataatttttgcttaactgttgaaccaaatgaatcagatgcttctattaattcaagtgggatttcacgaatagccaagttagtaaagcgcactgttggaggcagagcaaatacaacagaggcaaagacacctggtaccataccgataccaaagaaggctactgcaggaataaggtaaacgaatgccggcatagtttgcataaagtcaagaattggattaacaacttgtttaactttatcactttttgccatccaaatacctagtggtacaccaataataatagaaattaaacttgctactaaaaccaagttaaaagtattaatcaactgttcccacagcccttggttatagataaatagcaaaccaatgaaagtaaatgtcggtaattgccattttttcttagctaagaaaaatacagcaattgtaattagtacaataaaaagtaaaggattaatgaatagtaatgtttttgtcatccaatccatcaatgcattaccgattgtctggataaagtcaaataaaccagaaaaagttttcgtaatccaattggtcgttgactctacaaatggtgcgaccggtaacttatgttgtaataaattttccaaaatgatttgtcctctctattaagcttctaccgtttcttttggcgattctactactgtttcatcttgaacgttagcaagtgcttcgatcacacgtcctctaatgataacccctaggagtctatcattatcatcagtaacggctatcggagcagatgaatcataaattaaaggcatgatatctgtaataactgtatcttttgagaccgttacaacatctttatcaatcacttcagaaagcggcaaatctttcttacgagcttcaattgcagcatctgcagttagggatcccagaagttggcgacgacgattcgttgccattaacattgagacttcctcacgatgcattcttgttaaagcaacttgtgggccatcaatttctaaaacagttgttaaaggttttatcataatattttgagcagttaacacttttgagcgatcaacgtcttcaacaaactcacgaacaaaatcattagccggattagtcaaaatctcttctcctgtaccaatctgcatgatttctccatctttcatcagagcaatacgatcaccaatacgtaacgcttcattcaaatcatggctgataaaaataatagtttgtttattcgtgtcttgaagatcaagaagctcatcttgcatttcacgacgaattaatgggtctaaagctgagaaggcctcatccatcagaaggattttagggctgttagcaagggcacgtgctaaaccaacacgctgttgcattcctcctgataattgactggggtactgatctttaaacggtaatagacctgcattgtccaaagctttttcagctaacgttgtacgttcttccttagaaacaccacgcatctctaacccaaactctgtattttctaaaattgtacgatgtgggaaaagaccaaaattttggaaaaccatgttgatatcatgacgacgaatgttacgtaaatcttctacattcatctttgcaatatctttaccatctaaatagatatttcctgatgatgggtcaatcaaacggtttaacatccgaactaaagttgattttcctgaaccagaaagtcccatgataacgaaaatttcgccttcttttatttcaaaactcgcatcatagacacctacagtcgctcctgttttttcaagaatttctgtcttactttttccttgcttaaccatttcaagagcagctttttgctttttcccaaaaattttggttaaattcttcacttctaaaatatttgtcattcttatctcctactaaaaatttcgtatcttatttttaaggttatgtgtcttatctataaagtgacgttaagttatcgtaaaagggtagtcacttttttactcaaaaaaataaactgccgaaacagaacataactataatatcatgtatggtctctttatgtcaacacctttgcttagagatattttaattagcccacaccattattgttatggcattattgaattatttaaagacttattagtattaatattacaactttaaaagtgaccacttaatacttttgaaaaagcggtcattcttctataaaataacaaaacacccttagaaaaaatctaaaagtgtttttgtttgtaagtataggcctgaaaaaagtgactacttgatattttcccatttccaattttgtacttctggaatatcgtctccgtgttcacgaatatagtctttgtgataagcaaccatttgattcatttcatcactgaaggcttgtgctttatttcctaaagaagcaagagctgcatcctgtgccagatggaatcggtccaattctgacatcacgcgcatatcaaatggtgttgtgatgtcaccattttcacggtaaccatgcgtatgcaaattatgattgtgacgactaaagaaaatatctcgaatcatatcttcataaccatggaaagcaaaaataacaggtttatctgtggtaaagactttgttaaactcttcatctgataaaccgcgagcatcttgtgaaggatgacgaagttttaggatgtctaatacattaacaaatctaatcttaagttctgggaaagccttatgaagaatgctaatagctgccaaagcttctaagttaggttctgttcccgccgcagcaaagacaacatctggctcttgattaagcgacacatttgaagcccagtcaatcaccttatatccttctgccactaactcttctgcttcagcaatagagtaaaattgtggacgagggtgcttagatgtcacaattaaattaattttatcttcagctttaaacgctttatccataacagctagaagtgagttagtatctgctggtaaatattcacgaatgtattcaggtgttttttcagctaaatgagttaaaatacctggatcttggtgagtataaccattatgatcttgttggaaaacagttgaagctgcaattaggttaagcgctggataatttttacgccatgttgtgtgtgtttttgatttacgtaaccatttgaaatgttgtgttaccattgaatctacaacgcgaaggaatgattcgtatgaagcaaagaagccgtgacgaccagttaaaacataaccttctaagaaaccttctgcttggtgttcagacaattgggaatcaataacacgtccagctggacttaaagcttcgtcataatctggtttacgacgaccaagccattgacggctagtacgtgtaaacacttcttgaagacgatttgatttcgtttcatctggaccaaaaatacggaaattatctggattagcatctaccaaatctgctgcatattttccaaattcaatcatatcttgtgccataatttgacctggaacattaatatcaagagcaaatttcttccaatctgctgtatccattgctttaacaataccagcattggttattggattcatggacatgcgacgatcaccttttggtgaaatagcagcaatctcatcaacgattttaccattttcatcaaataattcttctggacggtatgattgaagccatgacaaaagagaatcaacatgttccatatggtgggcatctactggaattggtacttggtgagcgcggaagccaccttcaattggtgttccttcccaagcttttggaccagtccaacccttaggaatacgtgcaactaagacagggaattttgcttggatagcttcttctgctggtttttgtcgtgcttctgattgaatggttttaatctcttgaatagcttgatctaatttttctgcaaacaaagcatgagcagccgcatgatcctcagagagttcaacaacatctgcaaaaataggtttccaacctaatccttcaaaaaactgagataattcttcatctgtcttacgttcaaagatagttgggttatggattttaccaccatttaaatagaagattggtagaacagcaccatcatttactggattgataaaggtattagatagccaaccagccataagtggtcctgtttcaccttcaccatcaccaataacagtcgcagcaataacatctggattgtctaggatggcacctgtcgcatgagaaagtgcgtaaccaagttcaccgccttcatgaattgaccctggtgtttctggtgcagcatgggatgcaattccacatgggaaagagaagattttacataactgcttaaagccatcctctgtttgctcaatatttgggtttaattcagtatatgaaccatctaaatatgaattagataccataacttgaccaccatgacctggaccttcaatatagaacatgtctaaatcgtatttattaatagcgcgatttaagtgagcatagataaaattttgtccaggtacagtgccccagtgaccaattggatgaacctttaagtcgttttcaaccagctctcgtctcaagagagggttatcctttagatacatttgtgctgcagaaatataattagctgctctccaccatgcatcaagtttttctaaatatgattttgtatcaaattctgacattatttctcctaatcttaattgtgattttagtaacatattttaaaattgaaaaactgcatatcatgcgacatacagtctctcattagccattatagaagtgctttaaattgaatatttgattcttgttcgaagcaatcatcaaaaccacgtgggtgatggtattcaattctatctttatcttgtggataagtgtatttacctccaacttcccaaataaatggatggaagtcatattgaaggcgttctttacgcattttccacaattgtaagatttcgtctgtagaagccatgaagttagaccagatatcgtagtgtacaggaataatgactttggcacggagattttctgccatacgaagaagatcgattgaagtcattttatcctgaataccaactgggttatcaccatagttgttaatagctacgtcaatcttgtagtctttaccatgtttagcaaaataatttgaaaaatgtgagtcagctccatgatagattgttccacctggtgtttcaaaaatatagttaactgctttacgagccatttcttcatcagtcacggctaaaccagcaagttctccatcatgttcttctgcaccatctactggaagtgtcaccaagcaagtacggtcaaatgattcaacagcagtaactttgatatctttaaactcaaatgattcacctggtttaatcacgatgattcgttcttctggaactccccattttttccaaatttcaccacattcatatggcccaacaaatttaacatggtctaagttaggattattaataatggctgccgcagtgttgatatcaatgtggtcactgtggaaatgtgaaacaagatagtaatccaattcattaatagcaaatggatcaataaccattggttgtgcgcgtaagtttggttggagtttacgaacacctgccatattagccatttggtgtccacgaaccatatcttttactttttttgttgatttaccgcggtttgaccataggtccataacaacattagcaccacctggtgttttaatccaaacaccacagtttcctaaccaccacattgcaaagttgccctcagcaacaacttcttcttcaatttcttcgtttagccatgtaccccattctgggaatgttgataaaatccatgattctctagtaatatctttaacgttaggcattttatttcctcctgattaattgtttcttacatctactagtataagttcaaatacttttgaaaaaaagaccaagtgtcacacatttatgtgttcaaaactgggctgtctgttccaaattagactcataattttaattaaaataagcacaaataaaaagtactcccattaaaagtactagctttctcaactttaattatcatgtcatagaggaactcattgcgattaaatatctagcacattgtttaaaagcaccaaaaaagccccagcttctttttctgtcttcagaaaagctgagaggctaccataaaattatattttaacaaactgtactttgaaggggaaggacgtcttggagcaattcttgatgaataagtttctcaatcttagatttcagcacgtagcgttcactatcttccttgacatattgagcaattgttttttcaagttcattggtaaattgattactatttgcacagttaccttttttagaaaagcgaatcaagcgaataatatcatcatctgtcaaaacagggtgaactactaacatcggaaaacgagattctaaagcatcactagtagagacaaccatatctacatgcataagatcactcacactttgatactgttcggttgtaaaaacagcttctatatcactatttgttaagtagcgttgacattgctttaaaagaagtttctgaatcgctattccttcatcagatacaataactaacttaagtttattaggagattgttgactattacgaagttcccctcctaaatgaatcgttagatatgctacatcatcatcggtcaatttgatttgccaagctttctctaaaagctttacagaagacgaggttatggcaaaaagttcttcatatttgtctttaatatgctctgttaaaggattaacagaaaaaataccataacgtttacgatataagagtgccttgcagtgagtaagaagttgtcttagtaagtcctttttatgaacaaagtgaaggtgatatcgttcttccaattctttcaaaaaactggttagagtagctcgcatatcatcataatcctggctctctaaatgattgtcacggtccttgcggaaactaagcataagcatggctactagtcccacttcaatctcatccagtgataactgaaaattttcttccagctcatcagccaactctttagcaatctcatattccttacgttgccaaaccaagctaaaatcactattaagagaggtctgtacttcaggacttaatcgcatcttacgataagccattagtataaaaggcaaaatctgaatcataaactgaccatcttgactgttgattttcttacctagacttcgttgagaaatgaagagataatgatgaaaataatcaagaacctctttagaaaaataagtgctggcaccaaaagcttgagacagtttatgattaaaaaggtctataaaactactacttccattatggtagatatcatctaagagcttatataagtactggataatggacaatgggtgaccatctaaaaaataaccacgacattttgttgattgtaactgtaaattatattctttctctgctaactcacttcttaattcgtttaaatcgtttaagatagtatttcgagaaacatcgtttagttgcatcaacctatcaatcgttacgcggtccttagctactacgatagatactaaagacagctgcaacctctcactacttttcatgacgtaactataatcagtcacttcatctaataaaagacgacaggctgctttttgtttttctgttagcaagattcctacacgtggataactaacaatctgaggcacatcgctaggcagtgcatcgtttatcttctctaagtgataatacactttacgtctagactgattaagtgcgttggcaattgccataactgtttcaggttcctctaatttcaataggtaaaagaggaggtcataactttttttatcgagaataatcaagaatatacctcttttctactcgaattcatacagacttattataacatctttttaaagccttttcattaaaagttttgactattactgatagagattaaacgttgaacatccctttttaatatctccaactctgtggggtattctagagctagatactcacaattagagaaactctttaacaaatcagtcagattaatctctccttcgaagaggctcttcgagaggtggggctttccagctacctgtataaaatttttacagtgaaggtaggtggtatcacaagctaagttatttaccgcttggtataggtcttggttgataaaggcccaattagcagtatcaaaaacaaaacttattggtatttgtaattctttcactagagtcataaaatattggcaattctccactgtagctgctttagggtcttgattattttccacctttataccaatagtttggcttttcaatatctctttaagaggttctaactcttctttacttaagtttctggtttgtccaacatttagcttaatgaaaggagctcctaactgtgatgcttctttaaggcctttattaagataaggattaactttccctcctttgataaggtcttcattagcactatagtaaagattgatatcataaaagtcagcctctgcttttaaagcgggtagctctctatctggatcttgaagcaattcttgacgtatctcaaatcgtgaaaatcctaaatcctttactaacttaatgagctgaacttgtgtaaaacctttgtctaactgttttttgaatacaatactattgataataatatcttcttgtttcataacaactcctttgatatccctacttattcagatgaccgagttccgaccaaataggatccagtgtttctaataatttttggtaagcgtgatatttttttttgtacccctttacttcggataattgaggtttataaatagcttttacacgaaccatatcttggactgcttcctttaacgaaatcttatctaaagcatgacgtgctaaaatagctcctcctaaccctcctaattctgtgccttctactgtttcaataggaaagtttaagatatcagaaaacatttgcatccatgctggtgagttggtagctccgccagagaaacgaattatttttggcacactgcccctactttttattaaatcagtgatatgctgcttatgtgcaaacgcaataccttcatataccgcacgtatcatctgagatttcgtcgatttagttgttagcccaaaaaagcaagcgctagcatcttgtgatgtgttactaccgtaaagaaacggaaagaaaataagtccatgatgtgtagcatcagtatgagtgagaaattcttctaaattatcatagatagaacctccactagatttagcgttatcaatttcttgatgcatgagcatttttaacataaaattaagattccctgcagaagtagggctacttgcctctaagagataacgacgatctggaaaataggaagtcataagaccactatcttgctttgctggttttaaacttggatatgtattaatattccaagttcccgaaataacactaaaagtatctgactctaaaacacctgatccaagagcacaagcatcgatgtcaaagagccctccaacaacgggggtcccttctacaagaccagtctcttttgctgcttgagaactaattcccccaggaactaaatctgcactatctataagttcaggaagtgagttttctatctctctaatgccaaaaaaatctaaaatagctggatcataagttcctgtttggaaatttatccaatgattacctgaagcgtcaccatattcttgctgtacttttcctgtaagcttataccgaataaagtcctttgcagaaaggaccgcccctattgatttataggtttcgggctgataatctttaagccaacgtaaaataactggactttgtgaagggaaaatatgttgccgagtcaactcccaaatattatcaagtttagattcgaaatattgcgccaaatctttggcacgattatctgtagacaaaattccttgttcaagtggctccaacttattatctagcagataaagacctttcccatgtccaatacatgctactgcactaatctgctcagggctgagttttgagatttgaataacctctctaatagcagaagttatagcattccacgttttaacaaggtttacttgacgatgaccagattgagtctcattttttaaagtttcaaaactcgaaacagcgatttggtgtcctaatttgtcaaaaataagcgccttggtatttgtaccgccgtagtcaatactaaggtaataagtcataatttgtctcctcattgttgatttaaaaaggaggtacaagaaactcttgtaccttgaaaactcttctaatagagattgagctctttggttgtatcatctatacctgctctgttagcctttacatgttcttctttaaagtaaacacgctcagcattattgtacataacatcttctagttcctcttgactgaaaatatcaacattctctagccaagtagctaattcttcgtaagtattgaaggtcgctgaccatggagaatcagttccccaaatgatacgcttagccccaagaacttctttagcaatacgtacattttgttctgattttggaaaaggaaaactatctggggcatcaatatcttgaatagctgaaatatcagtatagatattgttgaagtttttccacatattaagttcagcacgcaatcgatttgaatgctcaacatgtggaaaagagaggtgacaaacaacaaaatcgagactcgtataaaggcgagctaaattagcaatagcatcaggttggtgactaatttgatcccaattgccataatcaactgtaactacaaatcctggatagtctaacagataagtcaaaatacgactcacatgtgggtctgtatcaagacggaaaggcgttttttgtccacggtatccatggataccccctccttgactaatttcaaatttaatagctcgaaaaccaaggacttcaacatgacgttttacaatttgcattgcgttatctgcaaatggatcaacagagaatgcgcctgtaaaacgttctggataacgtttaatagctaaatgcgtataataattttgataaccattaagatgaccttgcaaaatgactgctttatctacaccattagcatccatatacttcaaaaaagcttcagctgtaaatgctttgtcaccgtattcgtctgggatgagcttaattaaatcaccatcatcccaaatagcataaccgtttccaagggcattaagacgtcctttaccattaaatcctgcaattgtatcaacaatatgagcatgtccatcaatttttttcatgagtattcctccaacagatttttaatcttcagcaataaagattttttcacaactaccttcatatccgctattcttatcagccatagttttaaggtatgcgtaaatagattcacgatgagtacgaagcaagaacaagaaagcaagatagataacaactgtcacaccaatatagagtgggttcccagatatccaagcaaagaagactagagctgtcaaaggatgagctaggagattaaagctcataatcaaagttacccctgctggtaaagcagttccaaaatgcttaacagcttctgtgtagattggacctagggcactagcagcataaagacctagtgaaaaccatatgattccattcaaaatagctttaagaatatttccttttgacacagctatcatagcttcaatcataaaagggatagcaataaggtcaacgactggtaaagcttcatttccaggtaaaatcaaggaaataacaaccattattggtactaaaatgagacctgcgataatagttgctggttcaccaaaaccaacaccgtcatcaactgcaataaaccaacgttttttatccagtgctccttgctcagcttgactttcttttttcttattgcgttcaactgcttcagcaagaggagcaaaagcactagcaaatacccccgtaatcaaaggaaaaatagtcataaccgctgcaagagcaactgcaaaaccaagtatacctccccaagtatcaatacttgcaaggttacgtaaactacctaatacaccaataatcacaccaagtataaaaccaagtgtcattggctcaccaaatatccctaacttagtctttaatgattctgggttcaactttaccttattgacaccaagtaggttccaaagaggatcaagaataagagctggaataagggtttcaatattatgaatcgagttgatcgttgcatttttaacaccgtaatactccgaccatcgatctgccaatacttctgacatcactaatgaatagagtaagacaaaaaccataaatgcgaaagacaatataaaattacctgttgctgcataggccattgtaccccaaatcatatagccaaagttattccaaagattagatgggacaaatactcgggtaatcccaagcaagaaaagccccaattcaattagcaagccaaaaacaaagaaagagaggccaatctcagaagaaaaggcggtgagagaaccagcctgccaaccaatatctacaattggtaaatggagaccagtagttttaaccatctgctggatatacttagtcaccataggagcaaaagctgatataatccaaccaaagcctgtgagtccaacaccagctcgtaaggcgctaaagaaagctcgccttggattgacctttagaaaaaggctgacaataaaaatcatagcgggtacaacagttgctgcaccaaagacttcaaagaatttatgtaaagcttctagcataagttcacctttattaaattattaagcgcttacatttactcgtaaaaaaatgggaggtcccattttttcaaaagatggctctgcgctcactagccaattatttattgacaatattttgtggcttgccatcaaagaaggcaatgatgttgtcagctgcttcttcagccaaagttctacgtccctcaatagtacctgtcccagcatgtggactcatgataacattatcaaggcttctcaatccttcagatacctgtggttcattctcaaaaacatctaatcccgcacccgcgatttcaccttctttcagtgcttcaataagtgcttcttcagaaacgattgggcctctagcagcgttgattaagtagcttcgatttttcatcttagcaaaaacatctttattgaatttgtggattgttgatggtaatgctggggcgtggatggttatgacatcagctgttttaataagctgatcaaattcgagataggttacaccaagctctttttccttatcttcaggaagtcgataaacatcattgtaaacaacagtcatcccaaatgctttagcaaaatttgcgactgtcaaaccgatgcgtcccattccgtaaatacctaatgttgaaccttgcaaagtcaaaccttgataacgttgttcgctcggatcaatccactctccacttcttacaatactatcataaaatgcaaggcgcttactggcagctaaaattaaagcaaaagtcatttccgctgtcggaactcgtactgcttgaggggaattagagactataattcctttttctttagcatacgcagtatctacatgatcaaaaccaaccgcatttaaagaaataatttgtaagttttcacctgcatcaatcatctctttatcgcctttttgtcccatgagtaaccatccgtcatattcagataaatgctctaacacatagtcacgtgaaaatgggcgatcttctgaataagtaacatcaaatcggtccataagctttcttagaccttctttaggcacaatacccgttactaagatttttttcttgtccatattgtctccttcttaaatttattttactaattgataaagagcaacttcgccacgtccgttattggctgagaaaagataagcttttccatctttttcaaaagctaagacattactagaagctgcttttgcatctactaattctgaaaccaagtgcccatctacaaagtgaaaaagccttaattctgctttttctgatcgccacccgaatacaaaacaagtctgattaagtaaacgaccactccaaatagcatgaccaaatggtgttttttctggataatggaataattctcgaccgaaatcttcagtgaagatgcgtaaacgatctccatgaaaaccttggataatcacatactcatccttgccatcctgattaatatccactttcaccacatcgcttgtctcctcatcgaaaagccgttctaattgccagtcgcctgtagtagaaaattctggataagtgagtttgaataccccttctactgaagtaatcaatgaatatccttcatcctgaatggcatagtatccatgattttttaataaagtttgaggcaattgttgcaatccttccaatgtatggttttgagtattaaaacgagcaacaaaaattcggcctttatcactccaatcctcagtgtgggctttactgttagcaattgtacaacctataaagtaaagttgattttctttacctttaatgagatcaaagcgatgtaaatacggaaaatcaaatgcgttacaaatgtcccaatgatctccttgaaaacttgcataaacaacctgacaatctttggccttaaaccctgggtaaaatttctgggttgccaaaaaatccatggttccgggaattggaataatactcatggtacctcccacatcttcccaaacaacaatttttgctaaatcgctattcaaatcataagcaaagcaggcttggtcaacctctgaagctactaataaaaaatcatagtcttgattttgcaaacgacaaactgaataacaagcttcaagtctgtctgacaataatttattaatcttcattctatcctcctttggtgaagataaaacttgagttaaccgtttaactaatggtgcaaaaaaataaaaacatttgagttaagagagttagagatggttcgttaaaagcttacctattcttaagttaaacggttaactcatttataattctattatactatcattttctataaaagcaagcgtttacatagtgttttttgcttttttataaaaaaatgcttgctctcgcaaacatttttaaaaagattgacgaataacgatttgattttttacttctagtaaccttgcagtagttggttcgtttccttgactaattttttcaattaaacattgggcagccaggcaaccaatgccatatgaatcctgttttatacaggaaacgtttggtgtaagcacctgcatccattctaaatcttcataactcccaagaccataatcctcagggtagctgaccgttgattgatttaattttttcataaaattcaaaagagttggaccgttcatcattaagaaccctggtttttgctctgaatgttcaatgatatcaagaattctctgtgtactaccatcttcagtgataataatcaacttatcaggatttgaactgaccacttctttaaaaccttcgtaacgaagctcacgggttgaaatcccttcaatgggataagtgacaaaatagatgtcatgatacccagcttcttgcattttttcaagaaatatttgagtcgattctttattgtcggatgctacagtatctactttaatatctttagcttgtctatcaaccatgacaagacgatcattactcaaagtttctataaatgaatgattaggatctacagaatctaaaataattcctgaaacgttttgctgatttaaacggtttaaattttccaactcaatgtcaatatcattatccgagttagtaaagttaaccgagtaaccaaattgttgacaagtatcatgtattcccttcatcacagacgaaataaagggattagtaatatcagcaataacgaccccaatagtacgggtattttttgtaactaaactttgagcaatcttacttggttgataaccagtctccttaatagctaaacgtattttttctttcgtttgcagagacattttcttatagttcccattgagataataggaaactgtagcttttgacacacctactaaatttgcaatatcactaatggttaccttctcaaacatctctatttccttattctaattagacttaatttatccgtattatatcatttaataagaaaaatgaaaataagtgttcttattggagaagattataaaaaaagacaaacccattatcaaagtttgtcttgcactagtataattaagagtttgctttatcgtaacactacttcttcttgaaactatcccaatcttttaagaaagtttcaatccctttatcagtaagcgggtgagtaaatagtgatgcaaatgttttatctggaatagtggcaatgtgcgcaccgcatttagcgacgccctccacatgcgccaatccacgaatgctagcagcaataatctcagattggaaaccataaaaatcaataatgtgacgaaggtcacgaatcaaagcataagcatctgttccaatatcttcaagacgacccacaaaaggactaataaatgttgcaccagctttcattgccgaaagaccttgagccacagtaaatattaatgtcacatttgtctttataccttcttttgataattgtgaaactgctgctaaaccttcttcagtcattggaattttaacaacaacatttggtgaccacttagcgatttctctagcttcggtaaccatttcatcacaagttaaacctgtcacttctgcactaactgggccatcaacgatttggcaaatttcgttaataacttctttaaagtcacgcccctcacgtgaaataatagtcggattggtagtaacaccatcaacgattcctaaacgattaagacgacgaatttcagaaacatcggcagtatctaaaaagtatttcatattattctccttaatgttcttgtcctttttgaccataataagcatttggtccatgcttacgtaaatagtgtttatccataatatattttggagctggttcaacacgtggattaatttgttcagtgaaacgattcatcttagcaacttcttcaagaacgactgagtgataaactgcttgtgctggatctttcccccaagtaaatggtccatgattacgtacaacaataccaggaacagccattggatctaaatcccgacgttcaaattcctctataataacgctacctgtttctttttcataagcagtgttaacttcatcttcactaagtgacctagcacatggtactggcccataaaaataatctgcatgtgttgttccataaaatggaatatcgcgacccgcttgtgcccaaccaactgcttctgttgaatgagtatgaacaataccaccgacttctggccatgctttataaagttgaacatgagttggaagatcagatgatggattcaaatccccctccactatatttccctctaagtctgtgacaaccatattttcaggtgtcaattggtcatagtcaactcctgaaggtttgataacaatcaatcctgcttcgcggtcaacttcagaaacgttaccccaagtaaatttaactaaactatgaactggtagtgatttattagcttcacacacacgttcacgcatttcttgcaatgattttgccatattatttcactcctgttttctccattaatgggtaaagaaaatcttgcgcctctttaatggctgcacgtgtttcctctacagtctcacagttctccgaccacatttcaatcaagaatggaccattataatttgttttcttaatgacagcaaacatttcttcccaatcaacacacccttgaccaaatggaacatcacggaattgacctttagacgtttcggtaacagcataagtatctttaatatgaagcgctgcaattgagcgatgtccattataaaattcactccaaagatcattatgccatgctgatacatttccagtatctgggtagacaaagagataaggagaatcaatctctttttccacagccaaatatttctcaatggaattcataaatggatcatccataatctcaatagatagaataacttgtgcttcttcggcccaagtacaagcttgacgaagattcttaataaagcgtgcacgtgtctctggagatttttcttcatagtacacatcatatcctgctaattgaatattacgaataccaatatcttgagcaaagacgatacattttttcatcatatccatcgcacgcgcttctttctcaggattattagatcccattgggaaacgacgatgaccactaaatgtaattgttggaacacgaactcctgtctcaaaaatagctttgaccaactcaagtcgttcttcttttgaccactccaaacgtgccaaacgttcatctgactcatcaatggataattctacaaaatcaaatcccaattctttagcaaattgtaggcgttctaaccagttaaaatgttttggtgttgccttctcgtaaattcctattggacgtgtcatatattacccccaaatacgtttaatttcatccttaaatgcacgtgctgctgcggctggatcatctgcctctgtaataccacgacccgcaataaaagtaaagacatcaacaccttcaaataattgaagagtatcagttgataaaccaccagttacagaaactcggaagcccatatcaatcaattttttaaccttattaaggtctttctctccccatgtttcgccagcaagaagcgcatcacgagattggtgataaatggcttgtgaaatacctgcatccaaccattgttgcgcttgctcataagtccaatcaccatatagttcgatttgaatttctccacgatcgccgcgttcttctttgatagcttttaaggctgcttccattgttggaatagtagcacaacagatacaagtcatccagtctgcaccgcgaacagcattatttttagcaacagtcccaccagcatcagcacattttgtatcagcaacaattattttgtcagggaagagactgcgaaggacctcaactaattcactacctacttgaagaaggcaaacagttccagcttcaataacatcaacttcatgtcctactgatacggcagctttgatagctccttgtaaatctgagtggtcaagtgcaacttgtaaatttggtaaacgttttgtcatgttgtttattctaaggacctgataaaaatactcattttatttgtggcaaagagtttcttatcacagagattttttataggtcctatcctttctattaatatcagtttattgattagctttctaaatctaaaccttctaaatatgggctgttttttgattcctctaccattgcaaggacttcttttgcttcttggcattccgtcaagcgctgaattgaattttccaattcaaaaagggcaataatttgagggatagcaacagaagtatgaatagctgaacttgttgcagcaagtgctaacaatactgagacttctttgccatctggaaaaactactggctctgttaatgtaattaatgaaaatgcatcacgttttacgcctgcttctggacgagcatgaggcatcgccatacccggcataagaatgtagtacggaccaaattcctctgtagattcaataatggcatcgtaatattctgcatcaacagcaccactttcaatcaatggatcaattgataatttgattgcttctttccaatcgcttgcagataatttaagacgaattgagtcattttcgataaaggcttgttttaaattcatgatttctccttaaaagtctaaagatatgggagagaaacttttgtctcactccctttgtctattaacttacaaaatttcttgtagttttgtttttatttcattgtcatccataaggttatcaagacctactaaatgaccttttgtacgtccgtctaattcatggataaggtggtttgaagcaaccacgatatcgtagtttgcagctaaaccttttgcttctccgactgagcaagatgctgactcaaagttgctaacgcctaattgacgaagcgcattttcgactttcattttgataaccattgatgatcccatgccgtttccgcatgctgtaagaactttaaccatttttatttcctccgttataaatttctattattctgcaggcgcatcaccacgatagtatgcttctttatctttagatttcataaattgaagttgtggaatagctaagaagaagagacatacaatcacgtaaccagcgatacctaaatacttgaagatgtaaccaaatgctaaccatgggaattcaaagtcgatatttccatgataaccacctgcaagtcctaaaagacctacagcaacagcaccaagtgccacctgaataatacctgagataaatgatagagctactgctgctttccagccaccacgtttatctgcataaacagcgattgccgcattatcaaagaatactggaacgaatcctgtgataatcaagattggatttttgaagacaacaagtagagcgattgtaattaattgaccaatcaaaccaaaagcaaatcctgaaagaactgcatttgaagaaccaaaaccatatgaagctgcaacgtcaactgctgggaatgatcctggaagaagtttgtttgagataccttggaaggcatttgtcaattctgtaacgaacatgcgtacaccttgcatcaaaatgaaaaggtaaactgagaatgtcaatgatgtttgaaggatgtacatgaagaaagcttgcttagttggtacaaatgcaccaggtccgattaatttaacattagacataatgtctggaccaaggacagctaagattcctccaaagaaaactagcatcaatgttgctgatgcaacaactgtatcatggaaaatatttaagaatgttggtaattttaagttatcaaggttttcttcttttttaccgaagaatggcgcaactttatcaacaaaccaaattgcaaattgttgttggtgtccgatggcaaatccgccaccacctgtaaggcgttgagttgcttcaacggtcatattagaacttaccgcccaatatagaccacaaatgataccaacagcccatgcaccaaaaccattacgaagttgtggaatcaagagcagtacaaatactgaaattgttgcagcttgttgtaccatgatatgaccagtaataaaaagagtacggactttagttactttacgaagagcaaccaagagaatgttaatcccaaaaccaatcaagagtgctgttgttgcaacactgataaagcccattgtttctaacttagcatttgctgatgctaaaccaaagtaagggtcaataacagcagcttctaaattaaattttttagcaagagcaactaagattggacggaatgtattaaccaatcctcctgcacctacgttcaaaatcaaatatccaacggtcgctttgataaaaccagcaaagacatcatgaagtggtttcttcaataaaagatacccaatgagtaccaatagacctacgaagaaggctggattctgcaagatattttgcgagaaccaattaaggggagctaggaagttttccataactaaagacctctctttatttaagtaatgtttttttgtatctttattatattttttgtaagcgttttaaaaaagaccaagaagtacacacttaagtgtgcaaaattgtgctgaacctaatttacaaaaaaatcatgtatcttaggatacatgtttttttatattttttaatgtagactcctaatgatttctacacgcgtcacaagaccatcgtgcatactatcaacacgcaatgcaacgttattaatatagactactgaaccaatagcaacgtccttttcctcatcatttaaatgacgaacaagtaagtctcctaaagtttcattgggttgacaaggtagttgaaccctagctaaaatattagcttttttgactttgttattagcacgtaaaacaatgttgcttgacccatcaaaatgggtgaaaagatatttacgaacagcaaacaaaatagcaactgaagcaatccccataaggtaatctgaaacactaccatgttcaattacaagttgacgagctaaggcaaacaataacacttcaattaaagtatctggggaaggttttgaaaacattttgatcaactcaatcccgactgctattgtcatggcgcgagcaaggaaagtctggaacaacttatcaacattttgatcaacagacaacatgctaaacaaatcatgaaagagtgctaaactaaaaaaaataatagctgttgccagaataactgacaaagcaatctctaaataataagccacctctacaataacatcttggaaaaatttacgcatacaatctcctcttttataaactaataacattataacatttcgtcgttaaagttactaattcaatgaaacaatagtgaccaccccttcattaaccttttaatcagtactaacgaatgtttgattacacattatgatataataagcttattggtaaataagtgggaggaaatgaaatattaattaataaacggttaagaacaatctccttactacattatctgttagcgctactacttcttatagacattatctttacgattgattttataattcacacgtcaacaatttccaaaaatagtctatcatatataagttatggtcaaggatttggttggtctatgattcttattaatttgatagctctacctatttgtttcctagtagaattgtcagctggtctactattaaaattagaaatgcataagcaacatggctactatcctctggaacgcttattgatgactggtaatattctaacagttgtatcgctagtattattacatactttgattcacaatatcaattcacttctttttttatcaattacagtagttttattgatttctgggaagtccttaagtcttattagtatctatctattaaaaagaaaaagtaaacatcaaaaagtctgactgtacagtcagacttttaatattaaatatttgaccaaacagactcaagaatgtttgtttgttcacgaccaggccctactgagaaagtagaaatacgaacaccaaccaattcgccaacacggcgaacgtaattacgtgcattttctggaagatcatctaagctacggcaagctgtaatatcttcagaccagcccggtaattcttcatagattggtttacaacgttttagctgttcaaggcttgctggataatagtcaatacgtttcccatcaaggtcataagccacacaaattttcaccgtatcaagccctgaaagaacatcaattgaattcagagagagattagtaatacctgatactcgacggctgtgacgcataacaacagaatcaaaccatccaacgcgacgaggacgaccagtcgttgtaccatactctttaccaatctcacgaatacggtcaccaacctcatcaaaaagttctgttgggaatggtccatcaccgacacggctagtgtaagctttacatacacctactactttattaattttacttggtccaactcccgaaccaattgtgacaccacctgctactggattggaagatgttacaaatgggtatgttccttgatcaatgtcgagcataactccttgtgctccttcaaaaagaacacgtttaccggcatcaagagcatcatttaagataacggatgtatcagtcacatattgcttaatttgttgaccatattcataatattcttcgaaaatatcatcaaattcaagaggtgtactgtcatacattttttcaaataaacgatttttctcagctaaattaattttcaaacgctcagcaaaaacttctctatcaagaaggtcagcaatacggataccgacacgcgcagccttgtccatgtaagctggcccaattcctttgatggttgttccaattttattatcacctttagcatcttcttgtagttggtcaagcttgatgtggtatggcaagataacatgcgcacggtctgaaatacgaaggttatccgttgttacaccttctccgtgaagataagctaactctttaactaatgatttcggattaacgacaacaccattaccaatgacagaaattttttctttgaagaaaattcctgaaggaattaaatgaagtttaaattttttgttatcaataacgatagtatgcccagcgttatcaccaccttgataacgtgcaattacttctgcgtcagcagataaaaaatctgtaattttacctttaccttcgtcaccccattgggtacctactacaacaactgaagtcatatttatttaacactgagtgagcctttttgggactccccaatcctttctggaaaaacatggcaggaatttcacctgcgagtttgtctgacaccttattatagcaaaaaatgtttttttttgccaaattcctcaaatattatcggaaaaaaagaaaaaaataattattagaagtgtaaaaaaacggtaaaaaactaacattatagttgataaagaaatcttgaaatttactgataccagcattcttaacaataaaaaattcaacgatctttttattagagtcgttgaattttaaattatcaagaacagttatcacaagtcagatatcatatctatattaatgatatttactattagcttttcatgaagtaactagttatctctagcctgtagctcttcttttgtaactaatttataatctttaaaaacaatgcctccaaaatagcctgctagtaaagataggataatacaacctagagcggttattagtacttttatcattgggttataggcaaacatgacagcaaatcctgcaattggtgtcgctgttccaggagtatcattaactaatttcatcaaggcaattaaaataccacaagctgcaccaccaacaaaattagtgacatagattggaatagggttagctgaagtcacgtcagcttgagttagaggctcaacagcaaaagctatattatctttacgacttccaagttttaatttatggaaaagtacaccattcataaatgacgaaccaaagacagacaaggctcctatagccataggcattccggttaatcctagcatagctgtcaatgccatagaagaaagtggtgctgtcgccactactacaattgtcccgccaagtataatccccattaaaatagggttgctatgagcacctgatgttaagatatctccaatggtgagcaaagtgctattaataagcggcgtcaacagtttggccacaagacgtgttaatggtgcaccaataataataattgaaataagatctaaaccaccaggaatatttctttccatccacttaacaagaaatcccactaaatatcctgcaaggaaaccaggaataatacctgttccagaaacagataaaccaattaaaactgcgtatcctggggttacaccaatagcaatagcaaccaatatagctgcagctacaccagaaagtgaaccattagcaccacccacttcacttaaaaattgaaatcccaaaactttaccaaagaaagaatcttgaaaagcttctacaaggaaggatgcacaagccgcagatgccaatgctcccattgcttttgttccgtagggtgctttataattaaataaagtgaaaatcgctaatacaagtattaaaagactggtcccaataatgatattcataaatatactcccgctaaaaatagttaagttttttattctcagtgtctgtgtactactgcttcaatttcaataaaggcgcctttaggtaatactgaaacttaattgtactacgaactggataaggtgcaacaaagaagtccgacataattattaggcttatctcatggattactccttagttgctaatataatcacattttacctaaaagcataaccatagtcaataataattttttattttattaacttttttttattacgataattttttattacattaatcttttaaaatagtctgatattgtcttttaaccataaatatattactataatagtaagattagcatagaggaactacgatatggataaagaaaaattagactattggaaaacgataataacgtttctccataatgttttaggtgataattacgaaattgttttgcatgtagtagatgaaaatgatatctatattggtgagttggttaatagtcacattagtggacgaaccataagttcacctctaacgactttcgcccttgatttaatcaagaataaagtttataaggaaaaagattttgttactaactataaggcgattgtcagccctctcaataaagaagttcgtggatctactttcttcatcaagaatgctcaaaatgaacttgaagggatgttatgtatcaaccttgatatttctgcataccaaaatattgctttggatattctagacttagttaatttaaatgttaacaaaatactacctaagtcccctcaaaaaatttctctccctcaacaggaggaacctgtagaagttctatcaggcaatattcaggatattattagtgagattgttgatcctagtcttttaaatcagaatattcatttaagtcaagaagttaaggtagaaattgtttctaaacttcacgaaaaaggtgtattccaattaaaaggtgccgtttcaaaggtcgctgaagttctcaacatctccgaaccaagcgtctatcgttatcttaaaaaaattgaaactcattaactctaaaactctttttaacttatagattaataagattggactcaaaagttcaatcttttattttttatgacaccggtataagattattttagttttctgtgccgtaaaacttagtttttattatttttttgataaactagtatcatctgttactaggaggaatgttgtcgtgattatcgatcgactgttacaaagaagccactctcatctaccgattctacaagctacatttggcttagagagagaaagccttcgtattcaccaacccactcaaagggttgctcaaacaccccatcccaaaacattagggagtcgtaactatcatccttatatccaaacggattatagtgaacctcaattagaactcattacacctattgcaaaggatagccaagaagccattcgatttttgaaagctataagtgatgttgctggacgctctatcaaccacgatgaatacttatggccgctttctatgccacccaaagtgagggaagaagacatacagattgcccaattagaggatgcttttgaatatgattatcgcaaatatttggagaagacttatggaaaactaatacaatccatctctggaattcactataatctcggtttaggtcaagagttattaacttctctctttgaattgagtcaagcagataatgctattgattttcagaaccagctttacatgaaattgtctcaaaattttttacgttaccgttggttactaacttatctatacggagcgagcccagtagctgaagaagactttttagatcagaaactgaataaccctgtccggtcacttagaaatagtcacttaggttatgtgaatcataaagatattcgtatttcttatactagcttgaaggattatgtcaacgatctagaaaatgctgtaaaaagtgggcaattgattgctgagaaagaattttattcacctgttcgtctccgtggtagtaaggcctgtcgtaattatttagaaaaaggaattacatatttagagtttcgcacttttgatctcaacccatttagcccaatcggtataacgcaggaaactgttgatactgttcaccttttcttattggcgcttttgtggatagattctagtagtcatattgaccaagatatcaaggaagccaatagattaaatgaccttatagcacttagtcatccattagaaaaattacctaatcaagcaccagtttctgacttagtggatgctatgcaatctgttatccaacattttaacttatcaccttactatcaagacctattggaatctgtaaaaaggcaaattcagtcacctgaattaacggtagctggtcaacttttagaaatgattgaaggactttccttagaaacatttggacaaagacaaggacaaatttatcacgattatgcttgggaagctccctacgccttaaagggatatgaaacgatggaactttctacccaattgctactatttgacgttatccaaaaaggagtcaacttcgaagtgctggatgaacaagatcaattcctaaaattatggcacaatagtcatattgagtacgttaaaaatggtaatatgacctcaaaagataactatattgtaccgctcgctatggctaacaaagttgttacaaaaaaaatcctagatgaaaagcatttcccaactccttttggagatgaatttactgaccgtaaagaggcacttaactatttttcacaaatccaagataaaccaatcgtcgttaagccaaaatctacaaactttggtttaggcatttctatttttaaaacatcagctaacttagcttcttatgaaaaagcaattgacatcgcttttaccgaagatagtgctattcttgtggaagaatatattgagggtaccgaataccgtttcttcgtccttgagggggactgtattgctgtattgcttagggtagcagctaatgtcgttggagatggtattcatactattagtcagctagttaaacttaaaaaccaaaaccctctcagaggctatgatcatcgctctcctctagaggttattgagctcggagaagtagaacagttaatgttggaacaacaaggatacactgttaacagtatccctccagaaggaacaaaaatagaacttcgccgtaattctaatatttccactggcggtgactctatagatgtaacaaatacaatggatcctacatataaacaactagcagctgagatggcagaggctatgggggcttgggtttgtggagttgatttaattattcctaatgccactcaagcatactcaaaagataagaaaaatgctacttgcattgaactaaactttaacccattgatgtatatgcacacctactgtcaagaggggcctggtcaatctattacacctcgaattttggctaaactgttcccagaattataactaaaaagagttccttaggctaagcttaaggaatttttggttaaaataaagttatcccttgtcatcactagttcatttaagataaaatattaacaactacagaaagttaggttaaatattattatggttaaaaaacgctattccaaaaattctcataatctaataacattacttggtattgttgttcttgcttccctgatttcagacttttggagtgaggtgattgctactctgttaattattggtggtggttattgtgcctattacgtttatgataaaaagcgtcttaaacgttttacatcaaaccaacgtattgaagctttaaaatccgatattaaagagactgaccaagacattagacacttggaaattttaaaaaaagacaatcgttctaaggaatatatcaaattagcacatcaaatattacctcaattggacctaattcgtaatgaagcaaaccaactacaaaaagccattgagcctaatatctataaacgtatcaccaaaaaagcaaatacatttagtaatgagattaacgaacaactaataaagctacatgcctctccagaactagaacctatttctgatcaggaagatgaaatgatacgcattgctccggaattaaaaccgttctatcacaatattcaagatgaccactttgctatcttaaaaaagattgaagaggcagataacaaagctgaattagcagcaattcatcaagccaatatgaaacgttttacagatgttctggctggctacatcagaatcaaacaatctcctaaaaattttaacaatgctaaggaacgcctagaacaagcattacaagcaattaaaaaatttaatttagatttagatgaaacgctgcgccaattgaatgaaagtgatatgaaagattttgacgttagcctaagaatgatgcaaggcgaaaggaacagtaaatgagcgatacctttaattttgatattgaccaaattgcagacaatgctatcactaaaacagataaaacaacagaaattatttccaaccagacaacaagccaaactgggcaaattgccttttttgaaaaactaacaccagcacaaaagtctgctatctctgaaaaaacaccagctttggtagatacttttgtcggcgatcaaaatgcgctccttgattttggacaatccgcagtagaaggcgttaataccactgttaatcatatcttgtctgagcagaaaaaaattcaaattcctcaagttgatgatttactaaaaaatgctaatcgcgaactaaatggatttattgccaaatataaagatgctactccggcagaattagagaaaaaaccaaacttgattcaaaaattattcaaacaaagcaagacctcgctacaggaattttattttgactcacaaaacatcgagcaaaaaatggatatgatggcagcgaatgttgtcaaacaagaagatactttggcaagaaatatcgtctctgctgaaatgctcattgaagataatactaaatctattgaaaatttggttggagttattgcttttattgaatcgagtcaagccgaggctgctaatcgtgcaagccacttacaacaagaaattctagcattagatagccaaacgtccgagtatcaaattaaaagtaaccaattagctcgaatgactgaagttatcaataccctcgaacagcaacatcctgaatatgtcagccgtctctacgttgcatgggcaacaacaccacagatgcgaaacttggtcaaagtatcgtcagatatgcgtcagaaacttggcatgttacgtcgaaataccattccaacaatgaaactctcaatcgctcagttaggcatgatgcaacaatctgtcaaatccggtgtcactgctgatgctattgtcaacgctaataatgcagcattgcagatgctggctgaaactagtaaagaagcgattccgatgttagagaagaccgcacaaagccccactgtttctattaaatctgtcactgcattagctgaaagcttagtggctcaaaataatggtattatcgctgccatagacaaaggacgtaaggaacgtgcccaattggaatctgctgttattaaatcggctgaaacaatcaatgattctgtcaaaattcgtgataaaaaaatagttgaagccttactcaacgaaggtaaatctacccaagaaaaagttgatgagtcttaacttactatcatatccactaaataaaaacgatactgtaaaacacagtatcgtttttatatcattaatttataccgttttcatctatattttcctgactatctccaatgcaaaataagccttttatgctataatatgacttatggataaaattataaaatcaatttcaacttccggttctttccgggcttatgtccttgattgtacagaaactgtaagaacagctcaagaaaaacatcagacactttcaagttctactgtagctcttgggagaacattaattgcaaatcaaattttagcagcaaatcaaaaaggaaatagtaaagtaactgtcaaggttattggagatagctcttttggtcatattatttctgtagctgatactaaaggaaatgttaaaggttacatccaaaatacgggtgttgatatcaagaaaacagctactggagaggtcttagttggacctttcatgggtaatggacactttgtcgttattaccgattacgcaactgggcaaccttacacttcaacaactccactaattacaggagaaattggagaagattttgcttattatttaaccgaaagtgagcaaacaccttctgccgtcggtttaaatgtcctcttagatgacgaggataaggttaaagttgcaggtggattcatgcttcaggtgctcccaggtgcttctgacgaagaaatttctcgctatgaaaaacgcattcaggagatgccttctatttcaagtctgctagagtctgaaaatcatatagaatctctcctttcagctatttacggagaagacgactacaagcgcttatcggaagactctttagccttctactgtgactgttcaaaagaacgttttgaagccgctctattgactttaggaactaaagaattgcaagccatgaaggatgaagataaaggtgttgaaattacttgtcaattttgcaaccagacttactatttcacagaagaagatttggagaagataattaatgactcaattaaatagttcatttatgattgggaaggttgaaattcctcatcgtaccgtactagcaccgatggcaggtattaccaattctgcttttcgtactatcgctaaagaatttggtgctggtctcgttgttatggaaatgatttctgagaaagggttactttataacaacgaaaagaccttacatatgctccatatcgatgaaaatgaacatcctatgtcaattcaactatttggtggcgatgcagaaggcttaaaacgtgcagctgactttatccaaagtaatacgaaagcagatatcgtagacatcaatatgggatgtccagttaacaaagttgttaaaaacgaagctggagctaaatggttacgtgaccctgaaaaaatttatcatattgttaaagaggtaacgtctgtacttgacattccattaacagtaaaaatgcgtacaggatggtctgactcatctaatgctatagaaaatgcactcgctgccgaatctgctggtgtatctgcacttgctatgcacggtcgaacgcgtgaacaaatgtatactggcacgtgtgaccatgaaacacttggcaaggtcgctaaagctgttactagtattccttttattgctaatggtgacattcgtactgttcacgatgccaaatttatgattgaagagattggagctgacgctataatggttggacgtggtgctcgtagcaatccttacatctttacacaaattaatcatttctttgaaacaggcgaaatccttcctgacctaccatttgagaagatgttagatgttgccgaggatcatctcactcgactagttaatttaaaaggtgaaactattgccgttcgtgaatttcgagggttagcacctcattatctgcgtggaaaatcaggcgcagcaaaaattagaggagctgtttcacgtgcagaaacactagcagaagttcaagaactttttgcaggtttacgctaaatcaaaaacagtcctttgactgttttttcctatctctgtacaaatttagcataaatcattgtgtaatgaaaactcaaaagtataacaaattattttagcataacagaattaaggagaattatgttgattgttttagctggaaccattggagcaggtaaaagctcccttgcagctgctctaggacaacacctagggacagatgttttctatgaggcggttgataataacccagttttagatctttactatcaagatccccaaaaatatgcttttttactacaaatattctttttaaataaacgattccaatctataaaagaagcctataaggctaacaacaatgttttggatcgttctatttttgaagatgaactattcctcactctaaattataagaatggaaatgtgactaaaacagagctagatatctataaagaacttcttgcaaatatgttggaagaattagaaggtatgcctaagaagagacctgatttgctagtctacattgatgtttcatttgataaaatgttagaacgtattgacaaacgaggacgcagctttgagcaagttgattctaacccagagttatacgactactacaaacaagtccattctgaatatccagaatggtatgaaaattacgacgtttcacctaaaattcggatcgatggtaacaaacttgatttcgtcaaaaatccagaggatcttcaacacgtccttgacactattgattccgaattgcaaaaacttgatttactataattaggtgatatctatgattataagacctgtcctaccctcagatgctaaagaattacttgctatctatgctccctacgttgctgacactacaataacgtttgaatacgatattcctagtatatcggaattcactaatcgtatcaaaaatatcagcaaatctttcccatatttagttgctgaagaaaatgggaaaatattaggttatgcatatgcttcaacttactacgctagagctgcctatgactggacttgcgagctttctatttaccttgataaagatgcacgtagcaaaaaaattggtagccaactatatgatacattggagaaagaattagttaaccaagggtatgttaatctactcgcttgtatcagtttaccaaatgatataagcattgcattccacaaaaaaagaggatttaatcaagtcgcacatttcccaaaaatcggatttaaatttgaacaatggcatgacattgtgtggttacaaaagcgattgaaatcttaaggtaatctttagatttattttaagttagcaaaagattaggatattataatatatttatcctaaaatttttcaacgactttcagtcgtacctatatctacaagtgcaattgttagatatagatccttttacttttcataaatctataagaaaatgtccaaaatattttggacgttttctttttatattaaaattccagtacccatcggtactggaatgttttatgattttgcaatatcaaatttcaatttgcctttggatacgccaatcttaattacttgcccctctttcacttgatttgccaatagtagttctgataaatgatcctctacttgcgtttgaatagttctacgcagtggacgagcacccatttctatatcatagccatcctctgccaagtgtttcaaggctgaaggctggaatttcagatccatacctttatctttaagcgctaaaattaaaggtttaaccataattttcacaacttcacgcatattatcttgactgagactatggaatacaactttctcatcaatacgattgataaactctggtcgataagcttttttaagctcctccataatacgtttttgcatagcagtataatcatggctgatatccttagctccaaaaccaactgttttatcgtcacgtaatgcagttgctcctaaattagaagtcataatgattatagtatttgaaaaatcaacttttcgtcctcgactatctgttaaaacgccatcatcaagcacttgtaataatacattaaaaatatctggatgagctttttcaacttcatcaaaaagtaaaactgaatatggtttattgcgtactttttcagtcaactctcctccttcatcataaccaacataacctggaggtgccccattcaggtgagaagctgcgaatttttccatatattccgacatatcaaaacgaattagggctgattcatcatcaaacaacacttctgccaaggcttttgctaactctgtcttaccaacaccagttggtcccaagaacataaaggaaccaataggacgcttaccagtacgaatgccagattgattgcgacggatagcacgactaatggcagtaactgcatcatcttgaccgataacacgtttatgcaattctttttctaaattgaggtattttttactatcagcttgtgtcaatttttcaacaggaataccagatagacgactgagagttgccataatatgatcttctgttacggcaataggcttacgctttttacccttataacttgcttttagagctttagaagcagatttcatatcatcatctaaaatagcttggtcaacttctgttaaaagcgaaggagcatttttcttaatcatcatttgcacagtggcagaagcttcatcaagtaagtctatagctgagtctggtaaattcttacttgtcaaataacgatgagccacttttacagcagtcataactgcttcatctgaaatagtaacattatgaaaggcttcatacgctggcttcaatccaagtagaatttcatatgcgtcttcaagatttggttcttctactaaaacttttgcaaagcgacgagataaagcagcatctttttcaatatgcttttgatattcctcttgagttgttgctccaacagtgcgtaaagtgcctcgggccaaagctggttttaaaatattagcagcatcaagtgtgctatcaataccagagccagaacccataatagtatgcagttcatcaatgaaaagaataatatgaccgtcttcttcaatatctgcaatgatttgattcatacgttcctcaaaatcaccacgaaaacgagttccagcaacaacgctcatcatatctaactctagaacacgcatatctctaagctcataaggaatatttccattagcaatacgttgtgctagaccgtacgccaaagctgttttaccgacacccgcatctccaactaagacaggattattctttgttttacgacttaagacttggaccatacgtgaaatttctttatcacgcccaataacaggttcaatttccccatcaaccgccatctgtgataaatcacgtgtgaaatcagctaaatcaccagcagtactcggtggtttcatcatatcagaaaaagaagcacccgactttgcttttttaggattacgtaattcataaattgctttgatatcatcttttgtaaaaccggcatgacgttctagagccttacgtaaatcaaccatacgaactgattcaccatcgtcttgacctctaaagccaactaactctaagatacgtgtggctaataaatctttattaaccaacatagcaagcaagacatgttcagtacccacatcttcagctcctactacgatactaatattttctgctaactttaagatctttttcaaagctggtgattgctctaaaaattgataattggtaatctcttctttcggtgctctacctaaagctaaaattgttgctgcttcgtactcttcaattgcaacttcagactcatattcagcaaatgtcaaaccagctactgaatcatgaactaaaaccattgctaaaagaagatgccagctttctaaatagtgactttcatagcgtgctgcttgaaattgcgccaatctgaatacttcttgtaattttatggaataatgactcataaatggaatccttttctatctaatcgttgtaataatttacggagcatacgagctctaataacagaggcttgctctcctaagacgtcatcacctgatgtcgccagaatcaaatttccttcacgttctgtaattatctcttcatcgaataataattgaatcaaatcatcaaaaacttgttcactgatacgctcgccaatcgttgataacatatttccaaataattggtgttgatcagaaaaatgaaccttagcaatgcggatgtaacctccaccacctcgtttactctcaaccacataaccacggctttcagtaaaccgtgtcttaatgacataattaatctgactaggaacaacttgaaaagtatcagctaaattggaacgctttatttcagcaattcctgattgttctaataatgattttatatattcttcaatattatcggaagtattttttatggccacaaattcactccttcctctttgactataactgactattattatatcaaatttttaaaagatacggaaatgaaatctatctaaggacagtaaaactagaatgaccgcggattttagttgtcattactagaaagataagataaaatggaataataccatagaaaggttttatttaatgaattacattattacatttttgatttcaatgattcccttagtggaactacgaggagctgtgccatttgcaatcgctaatggaatacctttgtgggaagcgctagctatcggtgttgttggaaacatgctacctgtacctatcatcttcttctttgctcgcaaagttctagaatggggagcagataaaccttatactggtaagtttttcacatggtgccttaaaaaaggacatagcggtggtcaaaaacttgaaaaagtagctggagaaaaaggattgtttattgccttgctattgtttgtaggcattcccttacccggaacaggagcctggactggcacgcttgcagctagcctcctagattgggaatttaaacatagtgttattgctgttatgctaggtgttatactagctggatgcatcatgggaacattatccattatcggcttcaacctattctagaaaagttaaggtgagatgactgtctctcctttttaatatttgccaatccaccaattcgatagcaaaataagacacttgacttaagccaagtgtcttattttaaaatatatttactgacaacattttgctgtcaaattataatataaagcgagtgttaattatttttcaagtgctgctgccattgtagctgcaacttctgcttcaaagtcgttagaagctttctcaataccttctccaacttcaaaacgtacgaaagcaactgctttagcatttactgactcaagataagcttcaactgttttgctatcatccatgatgtaaacttgagcaaggagtgtgtactcttggtcaactttagtgttgtcaagcatgaaacgatccattttacctggaacgattttatcccagattttttctggtttaccttctgcagctaattctgctttgatgtcttcttctgcttgggcaataacttcatcagtcaattgagcttttgatccatatttaaggaatggaagagctggtttgttaaccatagcacgactctcgttgtcttgctcaattttgtggttcaactgtgctaattcatcatgaacaaattgtgcatcaagttcagtatatgaaagaacagttggcttcatagctgcaacgtgcattgatacttgtttagcaagtgcatcgtcgccaccttcaacaacagtaattactccgatacgtccaccattatgttggtatgcaccaaaatgttgctcatcagtcttttcaactaaagcgaagcgacggaatgaaattttttcaccaattgtagcagttgcagttacaaatgcttgttctaaagtttcacctgaaggcattgttaaagcaagtgcttcttcattgtttgaaggacgtccttctgcaataactttagcagtttcattaactaatgttacaaattggtcgtttttagcaacaaagtcagtctcagcgttaacttcaataactgctgcaacgttaccatcaacataaacacctgttaaaccttcagcagcaacacggtctgcttttttagctgctttagccatacctttttcgcgaagtaattcaatcgctttatcaaggtcaccatcagtttctactaatgcttttttagcgtccataacgcctgcacctgatttttcacgcaattcttttacaagtttagctgtgatttctgccattttcgttctcctcttaatttcaaataatgattaaaaaaacgagacagagcggtttgcatctgccccgttttaggatttacaataaattaaatattagtcgttgtttgatccttcaactacttcaacgatttcttcaattgaatctgcttgtgcttcttgagcgaagtcaacgtcagcatcttcaccttgacgaccttcaataactgcatcagctaatttagaagtaattaatttaacggcgcgaatagcgtcatcgtttgctgggatgataacatcgatatcatctggatcagcgttagtgtcaaccatagctacaactggaataccaagttttttagcttctttaacagcgatttgctctttatgtgggtcaacaacatacattacatctgggatgcgtggcatatcttcgataccacccaagaatttttcaagacgtgcacgttgtttgtttaacaatgcaacttctttcttaggaagaagttcaaaagttccttcttcttccatacgtttgatttctttcaaacgagcaatacgtttttggatagttccccagttagtaagagttccacctaaccaacggtggttaatgaagtattgaccagcacgtttagcttcttcagcaacagcttcagctgcttgtttcttagtaccaacaaacaagataactgcatcgtttgctgcagcatcacgaacaaattcgtaagcttggtcagctaattttacagtttgttgaaggtcgataacgtggataccattacgttctgtgaagatgtacttagccatcttagggttccagcgacgagtttggtgaccaaagtgaacaccagcctcaagaagttgtttcattgaaattactgccatgagtaagttctcctttaaaaatgttttttcctctctcagacttcgacttgcagcctaacctttcggcaacaagaccacaattgatctaagatgagtatttgtcactttaagcaactataatagtttatcaaaaaaagttagatttgacaagctataaaatcttctactctattagaaaaatcatacttttcttagaaaaatgtaaacgtttttattggagatttaaaagtatttcgtttataattaggctattaaaaaataaaggaggacattattatgtcattagtcggaaaagaaattattgaattttcagctcaagcttatcacgatggaaaattcatcactgttacaaatgaagacgttaaaggaaaatgggcagttttttgtttctacccagcagacttttcatttgtttgcccaactgaacttggtgaccttcaagagcaatacgaaacacttaaatctcttgatgtagaagtttattctgtctctactgatactcattttgttcataaagcatggcatgatgactcagatgtcgttggtactatcacatatcctatgattggtgacccttcacaccttatttcacaaggttttgatgtccttggacaagatggtctagcacaacgtggtacatttatcattgatccagacggtgtcatccaaatgatggaaattaatgctgatggcatcggacgtgatgcaagtactctcattgataaagtccgtgctgctcaatacatccgccaacatacaggtgaagtttgtccagctaaatggaaagaaggagctgaaactttaactcctagtttagaccttgtaggtaaaatttaataaccaggaggtaatccatggtcttagataaagaaatcaaggctcaattagcgcaatatttagatttgctagaatctgatattgtattacaagctgatttaggagataacgataattctcaaaaagtaaaggattttctagatgaaattgtcgctatgtctgatcgcatcagccttgaatcaacacatttaaaacgtcaacctagttttggaattgcaaaaaaagggcatgaaagtcgcgttattttttcaggcttgccaatggggcatgaattcacatctttcattttagctttgttgcaagtctctggtcgcgcaccaaaagttgatgaagatattatcaaacgaattaaggggattgagaaaactatcaatctagaaacttatgtttcattaacttgccataattgtccagatgtcgttcaagcctttaatataatggctgttttgaatccgaatatcactcatactatgattgaaggaggcatgtatcaagacgaagtcaaatcaaaaggtatcatgtctgttcctactgtttataaggaccaagaagaatttacttctggccgtgctacaattgaacagcttttagaacaactagatggacctcttgatgctgaagcatttgctgacaaaggtgtctatgatgttctagttattggtggtggtcctgcaggtaacagtgctgcaatttatgccgcccgtaaagggttaaaaacaggtattttagcagaaacttttggtggacaagttatcgaaacagttggtattgagaacatgattggtacactgtacacagaaggccctaaattaatggctcaaattgaagagcataccaaatcttacgatattgatattatcaagagtcaattagcaactggcattgagaaaaaagaattagttgaggtaacactggctaacggagctattttacaagctaaaactgctatcctagctctgggtgctaagtggcgaaatatcaacgttcctggcgaggaagaattccgcaataaaggtgttacttactgtccacattgtgatggccctcttttcgaaggaaaagatgttgctgttataggtggtggtaattcaggtatggaagctgctttagatctagccggtgtcactaaacatgttacagtcctagaattcttacctgagctcaaagcagaccaagtactgcaagaacgagcagctaaaactgacaatttaactattcttaagaatgttgctactaaagatatcgttggtgaagatcatgtcactggtttaaactataccgatcgtgatacaaacgaagaaaaacacattgatttagaaggtgtttttgtacaaattggtcttgtaccaagtacatcttggctcaaggatagcggcattgaactcaatgaacgtcaagaaattgtcgttgataaatttggctcaacaaatatccctggtatttttgctgcaggtgactgtacagatgctgcctacaagcaaatcattatttccatggggtctggtgccacagctgccattggcgcatttgattatttaatcagacaataatctaaaagagattgatacaatgggtatcaatctctttttttgggtaatatgaggaagtttaagggctaaaattggctattttacgaaagaggcttgacgaatcttttttttttcgatagaatattatctgttatggcggtatagccaagtggtaaggcacggctctgcaaaagcttgatcgtcggttcaaatccgtctaccgcctttcagtacctgaattaacaggaattaaccgaatgaaaagcctgattttataggcttttttgattttccatcaggttaaatcaggctaactttaaaaataatttggggcgaatttggggcggacggtttttcataggtcaatttttgaaaagtattactatctattttcataattttttatacagaaaaaagcggccatcttgaccgctctttcttatacttgcaattcctcacggattgctttttgcaacagctggctaaagttgaccttgttttcttttccaacttccacaagccagcttggcagtgtgacagtcttgttgacaatcttagagcgttcacgctcacggacaagctcagtatcaactgaaatagcctgaatcacatcttcgtcacttgctaaattgcttgcaagagccttgaatgatgatgctttaggaaactctttgccctcgtcttcaaacataattgtatagatttcaaggacttcacgagcgttaaaaatggcctcgttcaagctatcagcttcactaaatgctccatgaaaatcagggaaagaaatgttatagccaccgttttctttatccacttcaaacaatgctaaataagtgtatttcataatattagattaagccaatgatcagagtatccccttttaggggtacggggaggagcgtcctcactccccatacaagactttgagaatgttgttcagtgtgcctggtctgtaatctttttcctttggcttaggtatcgtcactgtccgtccgtctggatgtttccaaacttcgtgtgaccctttgccaaagttagttttactaaaaccttgcttcttagcaattttcttaagctctcgctctgtcattggcttatctcctttccttatctttaattgtattatacacttgttttaaacacttgtcaatagaaaacacttgtttttaacaaatatttttaaaatttttaacaaaaaaagtccattataaccgatattttgagggaagtccgttataacggaaaaacagcccccggcaattgctgagggcttattttgtcttatcgtatctaattctaaactggctttttagtcagttcataagtgataccgttgatggtaacttcaataccttcaatagtaatgtcaatcttgtctttgctaccgtcaccaatgtcggtagctttatcaaacttgtccagtgaaccattttctgcctcaatagccttgaggcggcttgaagctccgacaatatagctatcaaagccgcttgcagcataatcatagacagcaccgccaactttaaacattcccttgatagcctcactgaaggttttagcaccagacaccttgtaagagccaccagcccttagaagataaaaccagtctgtcagaaagtcatccacgcttgcatagtgcatatagtgaccgccctcatttgaaggacgtgcggaaccttgtgtgacagtgacaccgcttggacggttgccttgaccagtccaggtcataccgccccagttattatctgccttcccaactgctgaagttccccaaagaccttcatagtgtaggatagtcagtgcataacttggaagaatatcatgctttttacagttgcccagaatcttgtccagcaccgcttttttcaagatagtcccattgaaagagaggtcgccctcttctttggtggctgtggcttgtccagttagctctgtttggcttgttttggtttccgtgggcttgtttacctcttgagccttaaacggctcagagggctgttttttgagcaattccgtcactcgtttctgaactgcatcatattgactaccaagcgactttttacgagcttcaccgttgccatgtttgccagcgattacctcttgaacaagttggtcaacagtcttttgattagtcgtagttttgccattgatgactgacataacagcctcatattgattgccaagcactgccttgcgtgcttcgccattaccgtagttaccagcaagggtttccttgaccaaggtatcaaggctttttccttgggtagaagctccgcttttcaaacggtaaacgtagcaatacatccagccactagcagccgctgtctgattgtagttgttcactgtgatgccattatttgcccagttacagtgaatgatattttcagggtcaataaacatgactacatgaccaccagctccgcttgagtgccctcgcatgccccaaattgctatatcaccacggacagcattccaatccacgttttcagcaataagctcataaccgtttttaatcagccaatcgtgcatgtactcagtgttgaccgcccaacctgctgagcttgcaccagctgacctgagagcataatagacagagctggaacagtcatagctgttagggccgtcacggtagtccatggaatagctgaccttgccttgacgtgcagacatccaggcaatggctatttcagtgttgatttccataggttactccttccaggcatcgtgcatttgtttgacagctgattcaacaaacaaagtgagatcatcgtctgacatgtggatattgtatttttgcaactcagctaaaatctgagccttagcagaagttagcttgtcagctcctttgaagccagtttcagtggccacttgctccacagcattaacagcgttcttggccaagatttctgtaatcaagacggccttttcaccgccttttttaatcaaataaaccttgacagcttgcactgcaattcctgccaaaatggtcaaaattcccatagctgagctgatgataatatctgtaatttgtgtcatgtttagtcctcctcaattggtaactgtttgaatttctcaaacaaggcttcaatttccccatttccgccaagcagttgataactctcaaagagaatgctcaactccctgaaatgttcaatagttgtgtagccttgagaaatttcctttgtcaaatcgtgaaaaagacggtaacgctggattttaagcgtaccgtcttttgtgatttctgaaattttctttgtttccgtggttgtatgatcaatcgtcttaaccttgtcaatcaagccagacaaatcttccttgatatcctcatactgatgttttatcagctggtctttccgattggctgaagtggtgataatagtgctgaacagaccgcccagcaccgtcaccatcgccacaaccacagtgctatctattaaccatggtggcattcactatctcctatcctgtttattttagatgagcttacttatcctccaagtgaggctcagtccagtcaggatttccgttctcatcaaaggtcatgatgtagtattcaagattaaagaaatcagctatgttgattgtgggtgttgtcccgccccattggttaaatgcccagacagtttctacgtccttgaattgacggcggccattgacgatgacaggacgtttctgcatgtcacggtacatgtagaagtcattgacagcattcttgcaacggatgaactcaccattttccttcatgtacttgagtgctgtcgccaagtcaaagggttctgtgattgtttcaaggtcaagtaaattattttctgttgtagtcacggttattctccttcaatgatttctggttgagtttgttcatcaagcaagccttctagttcggaaactcttgcttgaagttcagcattttgctgagtcagttgctgtttctcctgaacaacttcagtcagctggatagccagcaagttcttagtggttgactcattggccaactgggctgtcaattcattgaccgtcaagcgtagcgcttgattgagttgttgttcttggttcatgattgttcctttctagttagaaccctgaagggtagtaagtgtaagagtcagcatttgggccttttgagaagttctcattgaatgagttcaaaatatctctgagagaagaataggatccatttccttttaaaatccagacatcaccaacctcaattcggctattgcgttcagcagccctattgtgtggtgtgattttcaagcctgaatcaagtgtccgaacatcccaaccatctgaattgtcaaaggcagagcttgctaatcggatttcatcaccaactaagtcaagtgagtcaatgtttgagccgttccatgcacggactccaacaaatccaccatcattggttgattctgtaccgtagcggttagaaccaatgaccgtaacaccagcatttcctttaccagatactgtaccagttgcgaacttaacaaactgagtaggatagccactcaaaacccgtttcagtgcagcttggtcagtgtagtaaagtatctgaccactgttcatctggatttccatggcattattcaaagctttaataacaccgcccgaaatctgactggcagatattgtcacggattgaacctgagtgatgaaggctgacttggcaaatagttgcttcaagtaggcatcgttggccatcaacttgttaaagaaagcttggtcgactttaagtttttctgccgttacagcttcagctgctaaaagcactcctgtgattgctccagccttaacatgtcccgtttcgacagcgcctgttaccaacttacgactagttacagaaccatcaaccaacatgttcccgctaacttttatcagtgagctaaacagagctatagcatcaggagtgaccttaaagtaagagccaatagctcttgccacatcattactcgtcttgcctgctctcaggacaatcccttcagaagtcatagtaatatcagtttgcttaagagttttatgatcaagacttgttacactagctttaatctcattagctgtctgttcaagcttagtatctgagtaggctttcaggtcatctggagatggactccagtccgcaggaattgtccccttagtcacacgaagtgttgtcactctaaacttaagttggctatccgtaaatctaattttaagggagtttgccctgaaattggcattgtttgccacaaaagatgcggtataggtaccacgatttgatatcgttctctgtacctcaccaacccgttcgattttgcctgcatgtccgtatagctccagttcataagaaccaaaagccgtccgactatccgcaaaatagttaaatgcaatagttacagtatctcccatttcaatcccttttacggctaaggtagtaccgaagctataaaggtcatagacggtagtccctgaaacgtttagatagacatctctttcagtccccaaagcatagttctgtgtccctgatgacagactttcaaagcgtcttatcaaacctcttgcattttcctcataggttgacttatccacataagagccattaacctctgttcgtaaggctgatagctgcttagcggtttcagacttgcttgcttcaaagtaacgactagctcgatttggttcactatctttataggtctcaagactaactaaacgattgctaaaggattccgacgtctgcctaatgctagactcagcacttgtcagttgacctgccaaggtttccgtacttgttctaaggttggctaagttttcatcaacggtctgcttgtattcggcgaagctagcttttaaggtttcatcgcgattattccagtctgtagcaacggtaccacgttccagcttaactttcgagagcgtcaaggggttagcatttgtcccccgcatcacaagccaggcttggtttctagggtcaggcataacaccacctaaatcaaagctctgagagataaagcctttccctggagataagtcaaagttaggcatgacaataattgtaatcttactagtgtccccggtgtgcatctttttataaagtctaacttctaaacgactagttgattctgcttcatagctaaaactcaaggtcgcttgactagttcgttcgagtagttggggattaatatcataggtcttaccatagaagttagccattagttctttaggttctccgccgtcaatgacataattatagccaccaacagagaatgactccagtttcgtgctaagtcctgtcagtttatcctcaacccgctttgtcgcaagttgttggacgctatcagcttcctttagccttgtctctgcgtctctaaggtcgtttagggctttttgcttaatgatatccatattgtgactaagatttgttagagagatttttacagcttctgtgcttgtgacttgtctatttaattcagctctaagctctatttcttttctggtcaagtctgcttgtgcctgactggctaaattcttagcttctgtcgcaaggggaagaagctgattatccatgcgattagatagttccgatttaaagctttctactttggcttttgcgatttcgatatcatcattaatttttgtttttgttttaccaaactctgcatcaaaggcagcgttagcatttttcacagccctttgaacagcaacgtcctgagctgtggcacttgctacaagtatagcatcagcaacattagacaagccacttgacaccccagaaccaccaactcctggcttatcatcaaaagttatggagatatactcttccgttaaagcgttaaactcgtaggcaatggccttcttgtagaggtcagcactgtgctttctactcttgaggttaaccgtgtcgcccagatttacaacttgaccgtcaagctcataggcttcaatctcaatggcatcagaaaccttatcaatgccctcatttgtaaacttagcctcagcccactttctaaggtcttcaacggtttcagcgttgttgttctcatactctttctcattgatgtagggataagagtttattagtggactgtcaacagacactctgagcgtcacttcatcttcagctccatcaggtttgaaggttgaccgtgcatgaatccttgtgacaacaccctgagagttcttggttcgttgataggatttgaggttcttgtgtgttgtgatgacaacaccacgatcagccccacggctacgtttgatagataaggcaaagttatcacggacaagctcaccttcccacgttccaacaatactgtgtttaccgtccataaggacagagtagagcgtttccgtttcagtcgtgttaaaggttcggctgtccataatatcgctggtaaaggagaaatcacctagcccagtcttagcattttgaaccatctgagacagtgccatagcacagccttgaccaaccacactcacaggagtgatagaccgcttcatgatgtcatcagagacatgataggcagtgatgtccatgctgtcgtcattctcaataggcttcttgatacggaacagctgagcgcccagcacaggcacaggcgacttaatcagcatatcctctttgataagctgatagatacctgaatccgtgataggatagcgaacagtcaggtagaaatcaccgttggtttcttctttgacaatggcagagctggcttcatgtagtggaatgccattccatttgaccgttcttacatttgcatcaagtaaaaagagcaactatgcccacccccaaactgtttcaaatttcaaagatgttatgccagcacctaaaacaacaccgacattctgccccttagcagtatcaactgtgataaaatcaccagcccacttaatgagttttccactagccgtcttaaagctaggattgtcaggatcattggtcatcacgagcgattctgagagcttttcaagcttaatcacttggttacctatcgtaaacgatgtctcagaagcgctctgaccaaccactgtaatcttcggaaaagcaagagctgacccttgaaccctcaaaaccccattaccagtcaatgtctggatgtcagtggtcttgaaaaacttggtagggtggcagatgaaggtaacatcgaccacccaggcaccaaattcgtcttttccaatctcaaagctatcaaccttataacaccaaagcctaatagttggttcctgttcattttccaaccaaaacttttcacggttcaaaagagcagaaaagcgataaatttcttcatcgcttggctcaattaaagtgatatgataaggcttctcaattagtccacggtgtctattcgattgcacaactgcaccactaataccatcatgctctaatagagctgttttggagctggagacaatgacatttggtctagtttcaaccaatacatcacacttaaaagatgatgttttcacaccgtcaatggtaagttcattgatttttgtcatgccattcctcctctcaaattagttttacgttgcaattcttcagcaatacgatttccaaccacgttggctagtctgttaaggtcagcttcttccctgatagtgacgccagagaagttaacgttaatattgttcgatgtattcatcgtgttagcaatactttgaccaattgcccccagggttgacttattcaatggcaagatggcttcagcgccagcctcaccgccaaccattgcacggtttccattcatgccaaatagggttggtttggtcatgataccgcccttggcataccagtcaatgccgatacttggtaagccaccttttagccaatccagagggttagcagaaccactcacacggaagtgaggtagtggaatatgaggccatttaatctggaagttaaacagattcttgatggcattgaccccgttggacactgcatttttcgccccatctattgcattggaaatagtggattttatggaattccaaatattgcttgctgttgaaagtatcccattaaaaattcctgaaatcgtgctactcaaattattaaacaaatttgacccagttgagaccagtccagaccacaaattggaaagagtggaagtgaaacttgaccacagagactgagcacctgtaatcaaacttgagaaaatattggacaaggaactagtaaagctagaccacaaagactgtccagttgagactactgaagaccaaaggccagaaagccaggcagtgaaatttgaccacgctgtggtggcagtcgtgactatgttagtccacaattcagaaagccaggcagcacaagaatcccacgttgactgaagccattcagttatggctccccagttcatgattgcttggatgataagtgttatgacggcaatagcccctactattgccgccactacaattccgacaggcgcacctattgcccctatggcgatgaccagcggtgcaattgcaccaagcaacatcatcacagcagttgtaactaggccaagaatcacgatagtctgttgatcagtttcgtttaggctagtaaaccaattgacagaagattcaagcatacccatcaaaggttctaaagctgggatgacagtctcaagcaatttaccgccaagttctgccattccctcttttgcttggttagaatactgagtcaacttatctattgggtcaagcgtctcatcaaatgtggtggagacagtaccagaggaacttttagctgcttcagctaagtcatcaaagctaaaagcaccacgctgaatagcatcgaccattctaggagcagccttactaccaaagatttctgaggcaatacttaaagcctctgtctcactagtagaattttgaatagcactaacagtctcattcaatccatctgtcagagtcttaccgtctttagcatagatgacagcagctttcgatagagaggatagagcagcagatgaatccacaccgcttttctcaaacttaccgatcagtgcagcaccttcttcaaaagaaagtcccaaacctttaatctgaggagcaccgtcaatggctttttgaacaatcgtgtcaactgactgtcctgtatcttgagcggctttggtcacattgtctaagaccattcccaagtcttcagctgtcaaaccgtaagcttcaatagcttgttttgcagaaatggcagagcttgaaatgtctgtttcgttaatctcagcatacttgataagtaattcagatgctgatttcagcttttccccagtcaaaccgaactgagtattcaattccccaacggcatcaccagcattctgaaagctggtaggcataccagtagcaatgtctttagcaatttcctgaagctctgctaaggcatcaccagtcagaccagttttggttgtgacggtgtccagagcctcatctatctcagaccaagcatctactgtcattttcccagcgtcaaccattttctggccaatctgaccagccttatctgcaacatccatcatgacatcagctcttaaatagctggttgcctctttgatgtctccagttgcagaacggcttgactcaccaagaatgtccattgcacggtcaatctttagaacttcaacttcagcttgaccgatttcattttgaagttgacgccattcttctgtacctattttctcatcgccaagggcagcttgttttttctttaattcttggactttatccccagccaattccgactgtttgccaagtagtttcattttttgctctgctagttcgacattgtcagggtctagctcaagcttttgattgacaatatcaagctctttagcaacattatcaagttctttgttaagattcagaatagactttgggtctcctacatcttcaatgtgtttctttgttgactccattgccttatcaacaatcttcatctgtgattcaaccttagcaatttcaagttgaagcttattccactgtgctgacccaacttcagattctcccagtgccttctgttgctttttgagttcagcaatttttatagcaccaacacgagcctgttcttgcaagttaaccaacttacgattcaacaagtcaacattgtctggatccatcttcaattgtctgttgatgttattgaagtcttttttcaaactagataaggcagtgttgataccttttacagacctatcaaattcaacagtattagcaccaaatttgacgtataagccttcaaacgtttcagtcatagatttcctcctttctttttaatctgacatcacgctaagtaaatcagcgttggataaggttttcttttcttcctgattgatgctcatttggtgaagcgttcccatcaaatagttaaagtgttgggattctgcccaaaaaacatccatccgattttcaaagataaccttataaaccttttcggaagttacaacttctgaagaggcttttttttatcttgcggcacctttgctctgcttcggttaaattcatagaagaggtctgagaagaaaccaatatcaatcaaatcaccaaaccaaggagctaatgaagctgtttcagcggtaagctcattttgtactaaacgtccattttcaacctcaccataaaggcaaggaatgacttcagtcaagaagttcatgaaatcaggttccataagtagaggcatcatcttgattttctcttcatcagttaaatcagataggttacagtttacaccagttgcaagagcaagttgtgtatatgctgtaagtgctttttggttgtcatcaaagaagttacgaccagttcgctgttcatacatcttgatagctggtaaagagtaaagaaagcgcactgtttcagtgtgctctctttcttcaccgtaactatcaaacgctgtgaatgatagttcttttttaatcattaagagcctccgctaacagttgtggtaggtgtagtggttgttccaagcgcttcattgatgaaatcaatcagcttgcctggtgacttgtcagcaaacaacttgtcaaacttcccacggacggttcctttgctgtcatcacgccatacaatttctgatacaggtttcttttcagaatccacaatgaagttatttggagaggcagtacaagggatttcaatttcttttggtgtcgctgatgtttcatcagttgatgtgctgcctttaggtgcagatgccttaacgttcgtccaaatgtggaactcttcaatctcagctccaaactcatctgtaacagtttcagcataaccccaaatgaagttagtattgacaccagtatcaatcaaagctggtggtgtagagttcgtaagctttttacctaagtgatcaatcataaactgtttaggaatctgataggttgtaatagacccttctgtggattttttaccttgcaaacgaacatgttccacattgtctgcatagtaggcatttgattcctgagaagtttcaaaggatgtgcttcgtagccctgtaaagggataaggtttctgcaagtctaaggcaccagcatcagttttagcaattttggcataaaaaccattcgcattaccgtgagtgacttcccttgtatcgtattgataagtcatgtaagactcctttcttatttaggtgtgattttaatggatttcatatcattaaggaatttctccttattcttgaggtaggctggtctgatatgctctctaggggcaacaaagccaccgtttttagtggcatgaccattctctaataggtgggatagagatttttctttgccattattatgaacaacagcggcgtcatctatgatgtcgtgtgtccaacctttttcgtaaacaccgtttcgtctagggcttccagttctaatgtcattttctgtactttgggcagccttcttaatgttctctaaaacttgattcttgatatccacctttagcggtgtcatcttcacgctaccaccgcccatttgtaaacacctcaagtctgtaagttgtcagtagatagtcagtgtcaggttgttttagattcaattgatttggctcacacataaaattagacagcatcaaattttcaatgttgtctagtttcttcttgtggtagtgactaacttgcaaagtcacttttctcatgtgcactctatcatcagcagtaatgctactgcctggtgttaaccgataatacaagatgacattgtcaggagaagatttctcctcacgttccatgtagaagaccttagccttcaaagggtttgtttcaaggatagattgaatatcttgtctagtgaaaaatttcttggccattatttcagttctccaagttcgatgatagtgtaatgaccatcatctgattctgtcccaatgttaaccttgtactctttgccattatatttgacatagtcaagagtgtcagtcacatagttggaacgaacactaaacctagcagtcagaacttgaccgtctgccatagctttatcaagccttcgctgatagattttctctttctcagctttgactttcttttctacggtctttttctcccagacacctttttcaacctcaacacgctcatcatagcaaagaatgatagctactcttgaagatttcatgtcttcacttcatagattgccttgagttgatacaaaagatttgtcatctctccgtcaatccattccatagtagcagcactgcctgtcatcaaagatttgtcaaaacgttgaacgcatctcagatgtaaccagtcaagcactgtctccctatcttcttccttaatgtctgtccatccctctaactccgtttctttatcgatacggataacaggaatagcatttctttgtaaatatgaaatcccactgttgatatatcgtaaaagttggacgtcaaagatatcctcttcaacgtcaacttctaccatttctttgattgttttaaggattgtcattcagactcccctttctatatttaacctgctgggtttgtaaacttaaccgctgatttgtactgagccaaacgaccacccataacactagcaagctcaatatgacggcggttgactgttacatcataatcatcaaagcggtcagcggcagcctcatcaccaatcatcttataagcttggtcagcaaatgcaatgattgggttagttgcaccgtccatccagtcatagatgtaaacttgaaaaccagcaataacatttccgttggttgcaattggagcaaatggttgaggatcgatgtagcgaccttctgcatctttgaccaatttcaatttacgagcaatggcttttgaagtgacaagaattggagtagtatttggaaccatcttatcaataccagcaaccagcgtttcaagaacagcattgtcaaatacaccagcaacattgatttcttgtgtttcaaagagattcgcttcagtttcttcagcaattgatttgatttcagtgattttgtcttcagcactgttagattttccatcaccaatgacaacagcacgttcaatagttcggatgaagccttgagcaagttctttcatcacatagttgaagtaagcgcctgttgtatctttcttcaagtcagaatattcaaaggcatatttgatataaactgtcgcagagttgatagtgaaatccaagaatgtgaagtcttcatctttcttagtcttaccagctttgtgtcctttagcttgagatacttgagtttgaagagcaacacgcaccgcataacgtggatcttttgaaacgtggttcaagatcccattatagttagtaaaggcatcttgaatagcgataagaacaggttctggaagaatcttagtgaggttagtcactcctttttcaacaaggttagcttcccacgctttacgggcactgtttgcgctaccttcgttgtccatcagaatacggacaaagtcaagagcagcggctttggttttcaaataatccataggtgtattacctttctgtttttctttaatgattttagcagctttgctgagttcttcttcagtttcttcaatgtcagaatccagcccagcaattgtttccttaatagctgttgcttgagaaaccaaactttctgcatcagtttttaactgttccaagtcatcgtcttcaatggttgaagatttcatctttgcttcaatagtggcttttttaagctttacctcagccagttcatcagttgctttttgacgagcttccaaaagctcaatgagtgattttttcatcatgtctcctttaaatttttgcaagtttactcatgatttcttgcctcatgttcgcctgagcgattcgcttatcaaccgccgacatatcaaattccttaatattgtcaacagttgcttgagggttagctggcacggtcacaacagaaatttcaaagatttcaacttccttgaaaatccatccgccataaggttgcttagcgtcaataggctcataatctttaataaagaacccaatactcaggctatccaatgcccccattttcatgaggtcataagttttcttagcctctggatcactaagattaaacgttgaacgtgttcgcaagcctttttcatccacagacaattcatgcttaccaataacacagttacggtcatgattaagacacatagggacaacagccttagatttcagagtgttatcaaaacaccccttggccatcacatcgccttctctgtctgtattgtcataggttgaagcgtaagcctcaaaatgaaagtcagctgattcatcctcaaccgacttcacaacaaaggtttttagtttttccattgcttacctcctttcgtgaaagatatgccaaccacccaccctttagattctactcagattcttctgcaccgatacgaacagcattcaggttggtttcaaatacttcaccgccctcatagccaggtaaaccaagataggtttcacggaactcatttgagttcatcaatccagcatatttggacttgaagccaccttcaaccaaatccttaaatgaaatcatgtcagccatatcaaagaagaccagtaacttattgccctgagtccgtgctgtcttcgtgaagtattttctgttaatctcctcagaatagacacgctgatataacttcatgacgctagaatagtaggctctatattgttcctcagtatagtcacaggtaaataatttctcattgataccatgagcattataaagctgtgatttcaagaactctaattcttccttagaagcagtagaatagtctttgctaagttcctggaattcttcgccttgctcaagataagcaatgccaccgttcttggccaagtcaagcatactatcaacacggtccctggcttgttgcttcaaatgttcatcagctgccttagttggtagctttaagaaacctctcaagctagaattgccatcgctaagcttttctgtcaaagcattcaagttaatgtcaataagctcagtaatctgattgagttgagccgtgacattcaacttaggattttcaaatacccacacatcagtaagaggaagctcaacagcaacatcatcaagcataagctccacgctctctgctgtccaagtcactgtcttcttagcaagccatatttcaaccagtcggccattcttccaacgtggtacaacaaccgccacaccgtcacgcagcatagccctagttacatttgaccaaaagacaacaggcacttctagtggatttggtgaaactgttagcacctcagccaaatcactatgctcataccaaaccatcgaatcgacaccgcctgggttacgagtaatcttgacatgcttaaaccttaactgagctgtgtcagttgaaatcttattgtagatgttatccaaatagatggagttcctacgccagtaggagatacttctttgaagataggttcttgtagatttccgattgtttggacggaaaatcctagcaaaaacctccttcaaatttttcaaatagttgttcattcttcacctcaatcaaagtagtagctcaagtcttccttgaaattttcataacagataaaggcatctagctgactagcaaagacatcaatcttttcttttgccttttccttgtttggaaaaatattgttattggcatcaattttgacacggacgttggcatgattccatgtcgccacaggatcatcaaagatgattttgcccatcttagccttctccttgtaaaccttgagcggatttgataacgatttgaccgtctggggaatatcgtgacaaatatccccgtagtagtcgttaaacaagcgaataagttcccttgcattgtagcggtcataaccgactgccacaggcaaaattctgttgtcactcataaactgccgtaactcttcaaatatataggcttggtcattgtagtccaattcatgcacatgcagcatgccacttaattcccactcagtgtacttatcacgcagttcctttggcaatgtctcaatggtatgccgtggcatgaatttcttgtttagatagtgccgttcttccccacgcacaaccataaaagagatagagcagatgtcattgacatctgacaagtcaatcccaatcacacaacgggcgttccgttcatcatctccgacaaacaaactctcatcaaacttatctgaccaacctttacactcttcattgctgaagtaagcaagatagttgttgacaggaagattgaaagtcttagccatcagctcagcttgttgtgctggatcattcttgctcatctcaatatcacgagcgatggtttctttctctgtcgtgataccaagtaatggcatagctttctgccacatatcagggtcatgaatctctgacacatcgtccaactgataaatccaaggcatgacagaatcattgataatcttgtcatcaaggatatctacccagatgttgtaatacttatcaaagagcttgtcacgcttcgttccatttgtggaaatgtaccaggttatccaattcttacgcttacggctggaaccatcattcacaaccttgatgaagtcatcatcataagtgtgcacctcatcaaagatattgtagtgagcattagtaccgtcaaggctttcatagtcagaagtcttgatagacataagactgttagttgtttcatacaagataccttgcttggttgaccgtaggatgtcagcctcacgcatatagtgcagcaagctttcttcattcgacaacatcgcccttgaggcattgaacaaatagccagcctgttcacgactgtaagcaagaagctgaatatcagcaccccactcaccgtcaatgatttgaccaacctcagcaatagcagaaccaagagtagtcttacctgtgccacgaggcacaataataggcacctcatgaatgagacgcctttcttcataatctgtgtattcttccaaggtatcaggattggtcttagtaacctcaaccgtgtgataaaagccccacgttgtttctaaccaaaccttttgtggtaatgctaagcgtaacttaccagcaaggcctttagtattgctgcactcttcctcaatgaactcaatccgtttgtcagcttcctcctgtttgaagaggtattgctctttgtatcgctcaacacgtctaattgatttcattgtgagcttacaaatacgaatcttaccagtatagatgagctgagcatacttatcaaaatatctcatctcaaccataacgtgctaacttctcctgaatcatttctttgagcctgtcaccctgtggactttgcttttcaatcgttgacatgatctgcatgttaagcttttgatacttttccattccatcaagtaggtacttatcaggtagctcaccgtcattgatgaccttattgatttcaagctggaagttttcaatcactttttgattgtgattgtattgagttttgagatttttcaacccaactgaatcattatcactgatttcaagcattttttcttttggaatcagcttgaaagtcttacgagatagctcaacacgttcctgccttgtgtacttttgccgttgattggcaagcttttccaactctttgaactgacttttggtgatatttgacctagtttcttcaaatatgcccagcttttttcgataccttgtaagggtagcacgacttattcctagcttttctaaaacttcattgattttcaaaatcatgctcctttcttgtatcaattttcgtcaattttgggggagaggtacacaagaggattgacaccgttattattttggcgctgtcaaaattcaaaatggggggagtccacaaaaattcaaaaataaaaaaatcaaaaataaatttatattccgattatctaaatttaaatttattttactttgaaaagtttttgtgttgtgacattcaagacaaagtaactgacagttctcttcgttgagagtgatagattcatcttgataattagtttcgtcaatctctatgatgtggtcaacaatactcttaccgtgaatcaaacgtccgcacatgtcacaacgcatacgcttagcttttctgattttatttctcagagttctccaaggtttcgagttgtagaatttaatctgccaagctctgaaccagtcagagtgtttagggtttctatagcccactacattgaccccaatgcaaaactatctcttgcaacctctcttgaaatgtctctaaactttaaatctgcttcactcactattcttttgtcatagttgattaacggatttagaatattatttacaaaacttggctttattacgattttatttacagtctcgttaggcttaatatctaaagtcacctcatatccatttgcaatatgttctaagtcgttcttcgtgagatagatttctaaagtgctaccagcttcaagcctaattccatcaaatgcattttcatctttcatggcatcgtcacccccaacaaaaaaaagaacatgcctaagcttgctctctggatttttctcatgttacaaatatatcagattgtttttgtcaataatacccatttttttgacaagattatttttctatggctgaaattatgtaaaataaccatgctgaactatctatatcttatattttatccaattttgtttcacactagaaaactaattaggacaaggctttaagctcacttcaaaatatagactagaaacttcctcgttatggatagttgaaaaaatcaaaaaaatattagaggctaaaattactcatcttagtatcaagctcatcttgccttacacaaatgtagattagtgtaactgctgggcttgaatgattgaatagtgacatcaagtcagcaacgttcttgtacttcttgtagtaatgatagccaaaggtttttcgcattgtatgagttccaacattgtcaatgccgaggtcttcagcagctcttttaagaaaccagtaaaccgtcttataactgagcgccttgttctttccgacacgactctgaaatagatactcatgaagttccttgtctttgacaaattccctcaattcgtttttgagtggccttgtcatcttaatacttttatacttaccagtcttttgttccctaactttgatgtgccagccttggacatctttgacctttagcttgagaatatctccaacacggaaacctgtattgatgcccaaaagaaatagcatgtaatacttttcattccaagatgatagatagtccttcatggcttgtatatcgtctttgtctcgtagcggttcaacaatattcatcgctttgctcctttctcaaaaaaataaagcaccaaggatttctcggtgcttagcgacactatcaatctatcagattgtttctgtcaattctatatgtttttttgacaagttacatgaacaataattttgcaagtgtatcaaggatgacttcacgtcttctataaatctgcttgctatgtctgtaaagataacctgtctcgccattttccatgatgtgccaaacttgaatccaatcatatccagtatgttctccccacctcagatggaaaattttcttatcatcgggttcaagtacctctagtaattctgatatcgcattttggaactcttccagtttcagaatcattgggtcactggcataagcaacagctagattttcagaagtattagttgaagttccactgcgactagctcctgaatcatcgattcctggcattgtcaggtttttgactgcatagattctttccagttcatgacggcgctgcccaataagtttatcaatttttagatacttagcctcaagctcaaactcaaggaaatcacgtcttgtcttacttgctgttttctttgtcaaattgttctcctttggaatgctcttcttgattctttccacttgatgattctgccattattatcattgttccaatatggcggtaatctacagccttccttttccacatagataatcttttcaacaacggtttcaagtggttgtggttgctggccttcatcaatccaaccaagcaaccaggctgggttgatattgtaagccttagcgatattttcaacctgaccaatagatggtgtaccgcctttttcataatgtagcagcgtgttcatagaaatgccagtggcttcatgcacatctctgcgactgaggccaagtttgtttcttagttcttcaagccttaacttcatcttcccctccatcttctgtgtggtcttcgattttctgattttgcacgagcaatagcagagcgacacatgtcatcccagacatagtcagcattttccaactgcaaatcaaggcatctaaccttcagacggtcattctcaacttctagccgttcaatgtctttgtatgctctgttatataattcatcttcaagaaatctaatacgctcagccattgcctcttgaatgacgatgtaggtgggtttcttatattcgttcataagcacctcctaaaacggtagatcatcatctgaaatatccataggctgactatttccaaatgatggtggcaattggtcatccatgcttgcctggttcgttgaattatcacgcttttcaagaatctggaagctgtcagcaacaacctcagtcacatagatacgctgaccttgctgattttcgtagcttcttgtctggattcgtccagtaataccaatcagcattccttttttcgtccaattggccaagttttcagcttgttgtcgccacatcacacagttgatgaaatcagcttcacgatcaccagcagcattcttgaaatttcgattgactgctaggttaaaagtagcgtttgcgatgtttgacggcgtgtaacgtagctcaacatctcttgtcaagcggccaataagtacaacattattgatcatcaacctcaccaacctttctgaaaatgtacttgtcagagaactcttttctgtatctctttttggtaaccctcatagcctcatttttattagtcgttggcacgtttgggttagcactatgaagatagacaggcataacctttccaccaacaaaagcatcaaattctttaaattcaaggattcctattgattttttcatttctctttctccatttcttcaatcaaccagtcaaggttctttcttgcttttttgaggtcttcaaggccgtttttctttcggtaccgtagttggtactttagggcatttcctagataaaatcctttgagcatttcaggggtcataaagttcctgagaacatcaattgactctaaaccgtatttcccttgataatggctaggatagtttacattgtcatgcaagattctgaatccagttatcttacctagctcactttctatctttgtgtagccttgttcaatgagtttcttcatttcctcatcttcatcatttagaatattgagccgttttgtcataaaatcacattttgtcattagtttccacgtcctttcaaatagtcaggaatgtcatcaccaacagtaatttcattgtattgttcctcagtaaccaagaacttgccataagcgccagctgtaactgtgtgacggccttcaatgatttctttatcagtgattttgccaaacatttcagcgccagcattgtcagccacatagataatcaccctgtcagcttcctgatggcctttctggtagccaatatcataaaacagatagttgaatccaaaaacaaatacagtgatgatgatggcactagcaaaagccttgagattgttgaagaattcttcccaattcaggtttttcattacaaatcctcctctttaacccaaattccattgattaacttgccttttctgtccttgatttcttcataggcaatagccaagcaatcatcagccgttgtcagattgtggattgcaatggaatgaatattagagtgaagcaagctaagttctggacggataagcggtgtttttgtttcgttgtggaagatatgcttgtagagtttctgagccatctcccccaaacttgaagcaagtagcaacagctccatatcttgtggacttgcttcaatctgagcaccgttcttgatttgttgttcaatgccaatcaggacaacttgcatgtccccaagtgaatcacggatgatttcactcttaccctttgcaataccagagtaaagctccccagtttcctcaatcagcttctgaaactgcttgacaggatttgcctcgtgtaagttacggtcaataaaccactgttcaaccttctcttcaagtgtcattgttttagtcattttgataaacctttcttaatattgtttttagattttcgttgattctatcagcctctttttcatcgataagaaaattgtctgcactttcattgatttctgagatggcaaactgtatagcatcacgatagccctgcttatagtcaatattattgctcattttgtttttcctccgtttttttttaattaaagtaatcaagtagtagcaagttttagaaccataatcaattctgatttccttgctccgtattttcattgttgcaactacccttggtctatgtatgccagagttctcaatgatatggtcaataattgcttgggcagccaactccttagattcaaactggccaattggaacagctttgtaaccatatagcatgaatgtagcttcataggtcatagcaatctccttgcaattgcagcaatgacgtttactgttacgctattaccagcttgtttatataattgactgttgctattgacctgactcgccttgtcaaaagcccagtcagggaagccttgtagcctccaacactcacgaggtgtaagctttctgattctaaatccgttagagataccaaaagtacccgtagtagtattaccgttatgaccgctagctgttaaagtgccaacaatatctttctttcttctgttgtacaagtcataaacaaccacaccttgttcttctccagtcaagagagtattggcaatacctttaccaactcgtccacgtcttgtctcagaatttgggtgagataagtttactgaatcgccagcctctgcctctgaatagccttttttagtggcttcttttatctttaaaagattgttttcttgccaactgttgcatgtgacagttggagaaatttcatattctcctccctgattatagcctctgcctcgctgaattatttttggctctaaccctccaccttgcatagttctgatagtcggtgctaggccatctggatcgtagactctatttggcatttcaaatttcccaggtaatctgcctacaacatttacagcgattttaactccttctcccttatttgttgttagagttggagataaaccttccgaatcatacacttccccattcattccattaccagatggattaacatttcctatttttctggtgtggataggataattttctgtgatgcttgattcgaaaggaaaaattggtctggtaccttctcctctaagatgtccgataataaacactcgttccctattctgggggactccaaaattcttgctgttaaagatttgccattccacgttgtaccccaattcatccaaggttctgatgatggtctcgaatgtagcccccccttcgtggttgaggagtcctttaacgttctcaaggaatagatacttaggtctgagaatagatgcgaacctagcaatttcaaagaacaaagttcctcgtgtatcttcaaaacctcgtctatttccagcaattgagaaagcctggcacggaaatccgccacagataacgtccacacttccgattcctcgaataaactcatctgaaactcttgtgatgtcatgtagttcaatttctccttcagtatcatgtattactttgtagctagctctagcaaatttatttatttcacagaatcctatgcactcatgcccagcttgctccattccaaggcgaaaaccaccaatgccagcaaagaggtctaaaaatttcatcaatacctcctatcttccatatccttcggataagcaaagctatttccagtcacaccctcaagaatccgactagacaaagcaccgttgccataattgtcagcatacaaggccttaatctccttactactcaggttagtgttgatgattgtgttgctccgattgtccaaaatctcatagagaatctgatgtgtccactcattgttctggctgtcgcctttgcgactctccttgcccaaatcgtccagaaagaggtagtccaccctagttagcagctcaatcatgtcagcctgtctgtacccattgtcaaccttgaagctttcttttattttggtaaaaaggctcaccagtgagataaaaagaactgattttggtgattcgtaggctttgaattgttcgttcatgaacttggccaagccgtaagtcagatgacttttgccaacaccagaagggccagtaataatggcattgcctgttctatcctgtcggtagaactgttccatacgcttggcataattgatagcatgctggtcaatttcatccttgatttcatagttctcaagactcttagccctcagcttatctgataccaagctatctctttcaaagacagcatatgtatcagcaagcttgctgttgattttgctctgactgttcaacttattttcaaagatgttgatagcggccttggtacactctggacactgcttgagttcttcaagccgtcccttaatcggtactttagtcagccagagctggcaaccgtgaacctcgcaggtttcttccaagacttgcctagtttcaaaattcttaaaaggattcatctaaaagcccaaccttccgtcaattgtttccgtcttgattcgtggtgcttgattcaaatagccttcaaacttagaaccaaagagcgtttcaggtctgagatacttttcatacttagtgcctgaccaatccttgaccgtggtatcaatcacatgtttgaaatcatctaacctgaatccttctgaccatctagccttgataagagttttgtttttctgaatgttaggtctgtaatttctattagctttttcattcaagtaagaaataatttccttgtatggaatatcttcttcctcattgtctgaaactgtaggataggtagttaagctatccttatctaagctacccttacttaacctaacctgtgtctccattttggatacattttgtatacaatttccaataggtttaagactagctgtttttgacttgtcatactctagctgagccttttctgactggtataaggttgattgaaagcggtcagactggatatagttgtgaatccgccaatgacggataacgactacaccactatcaaagggaatcaagaacccttttgcaatcagtaatttcatatcatcatcactagcgccaatagttctctgaatcgtctttgccttatctataaagccctcatcatcagctcccatgttcaaatggaaatagagagcttgggatgatagtggcatttccaaaaaacggtcagtctcagtgatttttctactaaacattctgcgttgtgccatcatcaacctcctttgttagatactcataagctctcttataagcgtctaagtaaagttcaaagacatcattgacgtatcggccagcccttgatagaaattcatagacctcatattcttccatatcttcgctaaaacgttcaaaagcctctggaagaatataagtaaatcctttatcttcgtcaaaattgtcaaataattgatcaagtaggaattcatcatcaaaatctaaatcatcataatcagcaccatcaaagaattcattgagaatttctcttttagccttgtcagtatcatagtaatgaactggcctacttgaacatagtaacttttcaagaaaataccccagatgaccagtatagtgattgtagaatgtgtcccattcacccatattgtagaaatttcgtgcaactaattccccaaagtctcctgtgatagcaagggatgaattttttctatcgaaaatgtaacgtaagttatactcatagcccttttctggattgtaatagtcaacaatggtgactgtatcagattcgttttttacagcaatatggttgctgaaatagtggtcaaattttttcatttcattcctcctcaacgctagaaaacttggtatattccttgtggaaatacagcttgactgtgccaaggtttccgtgtctgttctttctgatgatcagctcagtgatgtcgttttctggctgaccttcttttttgtcttggtaataagcatcacgatagaggaaggcgacaatatcagcgtcttgctcaatgctgcctgattcccttaagtcggacatgataggccttttgtcgtttctttgctcaaccccacggctaagctgtgatagtgcaatgactggcacttttaattccttggcaataatctttaactgcctagaaatctcagatacctcttgctgtcggttgtcagaccgtgacccttgaatgagttgaagatagtcaatgactatcaatccaagtccgtcagtctcttgagatagcctcctagctcttgctctgatgtcagtaatcttgactccagctgtgtcatctataaagattggagcttcagcaagctgaccctgtgcatagataagacgttgccactcattaaccgtcaaatttcctgttctaatatgatggttgatgattgttccttcagctgacaacatccgctcaacaaggctttcagcccccatttcaagcgagaagacggccacagccttattggacttagttgccacattctgagctatgttaagagctagggctgtcttccccatcgctggccgtgccgctaagacaattagctggtcttcatgcaagcctgttatcagcttgtcaaagtcataaaatcctgtttcaataccagtgatttgactggtattgtttgagcgttcctcaatctttgaatgattttccaaaaggacatcatggataggtctgaaactactcttgttactggcttgactaacttcgataagtgatcgctcagcttttgcgataatctcatcaatatccatgtcctcatcataggcattgccaattgagtcagacaagttgtcaatgatagaccgtagctgtgcttttttagcaacaatcttggcataatgctcagcgtgtgagctggttggcactgcattaacaatctcagcgatgtagctgataccgccaaccatgccaagttcatccgtactttccagcgttgacttgattgtgacaatatcgatggcctcgccacgatcagcaaggctcaccatggccttaaatagaatcttgtgagctggcctgtaaaagtcatttggtttcagatactcagccacctcaatcattttttcaggtttgataaaaattgaaccaagaaccgactgctcagcctggatatcgtgaggcaatacttttaattcatccatagctttcctcagtcaacaaagacttctttctttgtttcagggtcaatgtcaacacgtcttccagtcttgtagtcaatgaagcctcgttgtgggatatattgagcaatgacagtcccagctgtctgtttgttcttgagagcttttctgagcttgatatttgagataagagactcaatcagggttactgaaataagtgtgcctactgcgataatttgtaaattgttcatgatatagttccttttgttctttcttagataacagttctttgccaattcttgtgataccattcaatgacttcatcacgagggtatttctcacgagcatttggaatcctcggaaaatccttatgacagttaaagcgttcatcaaatgtcccagtatctttagtacctaagagcattaaagcgcattgagacttgttgagttctaaaggaaatctatacttttcgtctgtcacaacgtgcattactttcatcgttctgtccattagaccagcttcgaactggtcaagcatttgaatcattagatcattcattatgcgtacctccatttatatccgtgagtctgtttttggtgccccattgctgttgctgttattctttgtgacgagatacctgttttcattgatgcagattttattgagtcaaacgtgtttatgaattccccttcaagtgtaaattgttctacaggtttacaacgacctaaagatgatttcgttgttctattcccatgattagcattttccttatctgtcgcccattctaaattatctactctattattaagtttattttcatcaatatgatttatcgttcgcttattgattggatttggtataaatgcttcagctactagtctatgaactcttatcgacttccttaatccattgactgaaagtgtcactattgcatagcctgaagataagctctgttttaagatgcgtccttttgtttttcttgttctctgttttgcattgactgttctaccaatagaccgaacacgaccaagattggaaacttgataatatcctttaacaattggtatatctttccaaacttcgttcattgtgatataatcctcttgtatctttatatatgagcctgattgccgtcaggcttttttgcgttttacagttcataagcgttcatctccaaaattttcattttggtatttgtgcttggttcccatgtcatccagtaagataatgctgcttcagcaaatttctttggcaacatgtcatagcgattgatattgaaatggtctttaaaatcaacctcagcttgtctaaagaccgactgtgcgaagactttatcagcataggctggactgtccattccacctagacaagagacaacacgagcttttctcttcttcagtaaggcttgagcaaagctaggatgaattggttgctcatttttcagataatcaacatcttgagccaatgccaactggtgctctttcagtttcttctgtccagtaaatagagcgatgaaagcctcatctgatagattttcaggcacataagctccctgttgccgaatctgtggcaatacctcgctagtgacccaacgtttgaattctttgacctgtggcaatttactggataagataagtgagtaaagaccagattcattgatgataatagtttcttgcatgcgacctaaattgtctgtgatgccctgttttagggcgtcatcctcatcaacatggagtgcaatcgcatttcgtgattttgaatagcctaaaatatcagccacgtctttcccaacaaaccaaggctcgttgttaatggttacagtacggacttcctgcccgtgaaaaacaaaaatttcgttcattcttaatcctccaacctcgtccagctctcatctatgtgtaatacatcagataccttatttttgagtttgtcgctccctttgccatatttcagcaattctgagatagttgccttagcaacaccacaagaacgagctagatgtgtttgtgtcatctgttcttcattcagcttatctttcactagctgaatccattttttctgttgttgactcatatttttcctttctagtttggtataattgacttgaaatcttttatgaaaggaggtcaagccatgaatttgaatcaaattcgtatcatagaggcatgccataaatttctaattggcatcacaaatttcgaagaagagttacaagatgacgttctcgtctatcgttacaaaggtaaccttgtcagctttgaaacctatcaagaatatgaacaacggtcatttgtagactataatctaaaatatggctatcttgatgacactagaacttacctagatgacagagctgatttgatagcagctttccctagcgaagagcacttgagagccttgcaaagagttaacgatgctgaacaagctcgtgtgcaaatctttaagctactatctcaggtcaatcttgactctctctccgaaaaaaattccaacatcaaaaaagataattttggatatgatttcttcaattttgcaactaaagaagaataccctgtttatcttttttcagatgatgaatcatttgagctagttgctatcagttgatacaacttcgccttcaaaatcaaatgacttcagttcgtgagctagttcttctagctcgcgggcttttttattgaactctttactaagttcaataaatttatccatgttagtaactttaactgtcactgtcattgaaccgattcccattcatctaccctcctttttaaattattaactaaaaagttagctaatctcttgactttttttaaatctagttttagaataagagcatagagaaaagacctactaaaagtaaggtttgacctaaagaaagcagacgccaatcagttttattaggctttattttttagttgtcttgttcgctaactctttagcttacgaatattattttaaacctagttttaatttttgtcaagaattttatatctagttttaaaatatttttttcgtatgccttagaaaggatacgatatgtctgttttaattgataggatacgtgaactcagtaataaaaagggaatgtctcttaatgacttagaagatacacttggctacagtcgtaattctctgtatagcttgaatgaaaattctaagatgggtaaaccaaaggaaattgcacagtattttaatgtctcactagattacctactaggtctaacagataatccacgaattgccagcgatgagacagctatcattgacggtcaagttgtggatctgagagaagcagctgcccataccatgctgtttgatggtaagccacttgatgaagatgatatagattttattacagcagtcctgtctgcacacttcaaaaataaacaaaaggattgattgcctatgaaactagaccaactctgtaaagagtttggagtggaattgtgcctgttcgatgccagcgactggcatagttcgggattttacaatccaataaccaaggtcttaggggttgatgtgaatctgtctgagcaagaacaaaaacaagtcgccctacatgagttacagcataaaaatcactttccatatcagtatcagctttttagagagagatgtgaactcgacgcaaataggaatatgatccaccatcttttgaaggaagaattggaaatcgctgaggaccacactcaattcaattacctggtctttatggaaaagtacaaattaaagaccatagctgatgaggctatgatcaaggaagagtatttgaatttagttggataaaatacgtgctcccctgaatcacgaataaaagcagggtgggaagatagttgttatggcattatttggtggcaaagacaaagaacctgaagtagaaatttttacagctgagccaaacgagcgagtttttgagtttaagaaatcaaagacgatagtaagaatagatgactactttatcagaattgcaagaaaaagcaacatgtcaaatatgcttctacatggacttgatggcgaaaaatcaattttgttatcagcaataactgcatatcaattaaaagagccaggggcaacggttggatatttacaattggtatatcctggatcagcagatactaaaggtggtgtctttgatgctgttaaggatgagaatacagtcacttttgtcaaagaagataaacaagccatcttagaattgaagatagcaatagaaaccgcattaaaaaataaggttcagaaataaataaaaagccctacgctcaactttggacggtccgagcgtaaggcgaatcgtataagaaaagttgccaatctggcaagtcttttcttgtactcattttatcagaaatgaggtaaaaaaacaaatggcatcatatcgaaaaagagagaacgggctgtgggaataccgcatttcctacaaaaccatagatggaaaatataaacggaaagagaaaggtggttttaagaccaagaagcttgctcaggcggcagcaatcgaaattgaaaagaaattgacccaaaacatcttgacaaatgacgaagtaactctatatgactttgtcaagacctggtcagaagtctataagcgtccgtatgtaaaagataagacttgggaaacctattcaaaaaactttaagcacatcaagaactatttccaagagttgaaggtcaaagatattacaccgctttactaccaaaaaaagttgaatgagtttggcgagaaatatgcccaagaaactcttgagaaatttcactatcaaataaaaggggctatgaaagttgctgtaagggaacaggttgttacctttaattttgcagaaggtgcaaaagtgaaatctcaggtagagcccaaaaatgaagaggaagattttttagaggagcgcgaatataaggctctcttggcccttacaagagagaacatccaatatgtatcctatttcactctttaccttcttgcagtcacaggactgcgtttttctgaggctatggggctaacctggagcgatatagacttcaaaaatggcattttggatataaacaagagttttgattactcgaatactcaagattttgcagatctgaagaatgagtcatcaaaaagaaaagttccaattgattcaaatacaatagatattcttcgagaatataagaaaaatcattggcaagctaatatcaagaatagagtgtgctttggtgtatctaattcagcttgcaataaactgattaagaaaattgtgggtaggaaagtcagaaatcactcattacggcacacatacgcttcgtttttgattttgaacggggttgacattgtgacaatttctaagctccttggacatgaaagtccagatattactctgaaagtttatacacatcagatggaagcactggctgagagaaattttgagaaaatcaaaaatatttttttagtcgcataatttggggcgaatttggggcgaaacaaccaaaaaccttgataaaccaaggttttcaaatccgtctaccgccttaaatataaaagattttatccaaagataacaaaaaatcaacgattgttcgttgatttttttgttatcagaattatttttttaaatccaataattgataaggtatagaagattgactatctcttaatgaatagctttctaattcattgacattatcccttaaaatttgagactctttagaactaattaaaccgtccctttcaaattcagagattgttctgcgttccaagtaatatcctcttagggtttcatttaaaatatctggcgttatgcgtgcaatgacacgttctacaaataaacctgatttaattaattctgcgtctcgaatgcgttcattttgtaagaaatctatcaaagttgcattataataaccttccatatcttctagcgtttctaaaatgaggtcattatttgataagtacaaatctgttaagtgctgacgattgacttctgctaacaaccgtttcctgtttttgaaatgttttttccgatttcgtattccttgtccaaatgttaaaaactcatgaacaataccacgaataacacgcataagaatcgttaaactataagtgatatttgacacaaagctacgattaacttggcgttctaagtattttaaataacgttggtaaatacgatattctttgatagaaatattgccataacgataagcagcttcaagtccatcgctttctatactaagcatcatcagttgcaattcagctaagtccttcttaatgtcactagattcttgttctaaaatgagatgacgaatacggctattataattatctataactgcataaaatgaagcttgattttcagaactcttaccatcttcttctaagacagataatacttttgttaaaatcgatagacgtattaaataatcatctttcacctgtaagggaggcgctaactttggtaatactaaaagtcccgttaaaaaactcattagcgttactgcaccaacagtgaaaagaatcaaactataccccaactctcctatgactgagtgcttgggtaataagagtattgttgctatggaaacacttcctttaactcctgaaaaagtcaacagttgaatctctctccaatactttttaaatgatttatggtatttgaaagatctccaagcataaaagcaagaaactgctagaaagcgaactagaaaaagtgtgcaagtaactaaaacaacaatactaataagatcaaaattactataagcgttacttgttaaaagaggaccaatgatacgtgtcagttctcttccaaatattaagaaaactaaaccatttaaaataaaatttaaggtttcccaaataacagaggtaacgcgatctacttgagcatcaaagagagtcacttttttcaaacgatttgcttgcattactcctgccactaccaccgcaataatagctgaaaatcccaacaaatcagcaacgaaataagcaacaaaaggtaaggttaattccaaaagtagagcccctgtaacatcagcagcatcaaatttctctaggacagtgagacataacctcattagaaaagcaaaaagcaagccaattaaaaaaccacccattatggccaatgctaacttgagactagcttttgctaaggagaaataacctgttacaagggctgttaaagcaaactggaaggaaactagaccactagcgtcatttaaaagaccttccaatttgaggatattttctgcccgtttaggaaattgaaacctcttagcaatcgatataaaggcaacggcatctgttgggcctaaggctgctccaagcgcaaagcatgccgcaagtggtaaactaactggcaaaaggtgccctgctacataaccaacgacaatagctgttaaaaataccgttggtaagattaagtaaagaataatagcccgatactttataaaactaccaatatcactttcttgaccttccctaaagttcaaaggagcaataacaaaggcaaggaataactcaggatcgatatggacttgtgacttatgaaaaactaagccagagagaatcccaaagaccaactggataaatggtaatggtaatttaggaaatatcctattgataacattagataaaatcaaaaacaggagaaagctgactattagaatagtttcttccatattattcctccttcataacatctatcaattctttcttcaatttctcaattttatcatcgatttttttagtatcttctctctccaatcgacagcgacatctttctttttcaagtattattaatttcttctttttcttctttactttacttaagtgaacatttgaaaattcttgatttttagaagaaaggtatttatcttttagtcgattcaattgttcttccaaagataattgagacatcatgacctcctatttaatgaccaaattattaataataagtattttttctttcatcggctatctctagtataacacgcatttcttaaattgatagattttaagaatatcgttgctcattatctccatatgtggtagactaacaacaatttaaataggaggttaaccaatgaaaaaattaacaaaaggcagccacattcgtgttcttagtccctcttcttccattgagcgtctgggtggttttgaggctaacctattagccaaagaagtactagaaaagctgggatttcaagtgtcattctctaagcactatctagaaaatgatatcctctattctgcttcgattactagccgtgtagaagatttacatgaagcatttgccgacccttctgttgatgccatattagcaaccattggcggattcaattccaacgagcttttaccatatttagattatgatttaatctctaagaatcccaaaataatttgtggttactcagattcaacggccttccttaatgctatttttgccaaagcaaaaatccaaacttacatgggccctgcttattcttctttcaaaatgaaggaaggtcaaccttaccaaacacaagcttggcttactgccatgacagaaaaccactatgaactttggcctagtgaagaatggtctagtgatccctggtatgatcccagcaaaccacgccaatttttcccaacagaatggaaaatttataatcacggaaaagcttccggtacgattatcggaggtaatctctctacgtttggcctacttcgaggtactccttatgcaccgaaaattgaacgctatgtcctcttgattgaagaggctgaggaaagtaatttttatgaatttgaccgcaaccttgctgcaattttacaagcttatcctcatccacaagctattcttatggggcgctttcctaaagaatgcggcatgactccacaagtctttgaatatatcctttcaaaacatgctattttcaaggaaattcctgttatttatgatatggattttgcgcacacccaacctcttttgacagtgactattggagctgagctaagcgttgacactactacattatctctatctataaaagaataaaaaaatactcctgctactcatctgagtaacgggagtttatcatttagagttaccaaataataacacgtttttcaactggacgccacatgttatcaccatctttaacatcaaactctttatggaattcttcaaaattcgttactgtaatattagttcgccattgtgctggggcgtgaacatctacactagctaacatttgcatatactcatcacgtgccttcatacgccaaattgtcgcaaagttaataaagaaatccctcgctgaaaaatctgactcacgctgcgcagcttctaaagcacaagcaactccacctaaatctgcaacattttctgatactgttagtttaccattgacttttgcgccataagattccagtccatcaaactgctcaactactttatctgtaagttttttgaaagcttcaaaatcttcatcagtccaccaattattcaaacttccatgttcatcaaatgaagctccattagtgtcaaaagcgtgtgatatttcatgtgcaatcactgcaccaattcccccataatttgctgatgaactttgctctaaagcataaaatggttcttgtaaaatggctgctgggaagacaatttggttttgttgtggatcataatacgcattgaccatgtgggcaggcatatgccattcacttctatcaactggtttattccatttactccaaccataggctattgaaattttgtctaaattagtagcattttcgacaagcgatagtttaggatcaatgatttttttagtataagtctctggtagtttctcagggtatccaatatgtggtgtgataacattaagtttcataatagctttttctcgcgttgactgtgcaagccaatccgccttttctaagcgtgacttatagacatcaatcatcgttgcaatcttatgctcaacatcagctttagcttctggagagaatttttctcctgcataccacaaacctagagcttgattgtaaggtcctgaagcaaggtagtaagctgcttttttcttatccattgcttgtggtgtgcctgataaagctcgactgtaaactcccgatttgatacgaatatcatcagttaagtaagcattataggcattcgcagctgataaaataagatctgcctttaataattcccaattagattctgagtaatagtcagatgcaaattctgtccagaaacgttcttcaggaacaataactttatctggtttttgtcctaatatcttttggaaaatagcatctaatggaagttcaggtgctaattttgtgaaatcttcccagttataaggatggtaaagtttaacatattccgaactctcttcgcgagataagacatattgtgccaattttgcatccaatgctaaaaccttatccaagatatctttaatttcctgttctgaaaggccaaacaaaggcagtaggtcttcttgacttttacgccaaaaagcaaggagttcctttcctttttcattatcttcactataataagttgtatctggtaaaataatcccaggcgcttcagcccaaagtacattcaattgagcattcataaagtcaggagccacaccaaatggaaattcatttggtttaccctctagttcatattctgcaacttttgatgcaaactcagagaaagattgtaggcctttatattcttcaattaatggtaatactggtgatactcctacctcttcacgtttttgataatcagctgtcattttatgaaaagcaataaaatgatttaaaatcgtatcacttggtttattttcatcagccagccacttatctgtcgttgacagcattaatgcttcaatgtcatcagcaagatcagaaaaaccacctgtccttggtttgtcatcaggaataacagctgtcttagcccactccccattaaccgcttggtaaaaatcatcttgatattttatcattattttctccttaatatctcatatgtaatctcttacagtctaacagaaaattcagagtttgactattaaaaatactctcatattggtgctttctctaaatatcattttgttatttttgctatactataaaccaacaaggaggttgttatgattgaaaaatattataattgggcaacgcttggaaccggcgttattgccaacgaattagcccaagcactagaagcacgtggacaaaaattatattctgtagctaatagaacttacgacaaaggacttgaatttgctaccaaatatggtatccaaaaagtttatgatcacatagatcaagtatttgaagaccctgaagtggatatcatttatatctctactccccacaatactcacatctcatttttacgaaaggctttagcaaatggtaagcacgttctttgcgaaaaatctattactttaaacagcactgaacttaaagaagccatagatttagccgaaactaaccatgttgtcttagctgaagccatgactatttttcatatgccaatttatcgccaattaaaaacattagttgatagtggaaaattaggaccgttaaaaatgattcaaatgaatttcggaagttataaagaatatgatatgactaaccgttttttcagtcgtgacctagcaggcggtgctttgctggacattggtgtttatgcactttcttgtattcgctggtttatgtcagaagcacctcacaacattacctctcaagttacatttgcaccaacaggagttgatgaacaagttggtatcctactaaccaatcctgcaaatgagatggcgactgtcagccttagtttacatgcaaaacaacctaaacgagcaactatcgcttacgataaaggctacattgaactttttgaatatccgcgaggacaaaaggcagttattacttatactgaggatgggcatcaagatattctcgaagctggcaaaactgaaaatgccctccaatatgaggtagctgatatggaagaagccgtttcaggaaaaactaaccacatgtacttaaactataccaaagacgttatggatatcatgacacagctacgtcaagaatggggatttacctacccagaagaagaaaaatgaagagagcttgacaatgattgtcaagccctttttagttaatatacactacattttcttaaaaaataggcgtttaaagaaataaatcataccaactgctaaacttaaaatagcataaacatagaaaactgcatttatttgtcctagtaaatgatcaaaacaagacagaagaatagccgcactagctccaccaatattacaaaatactaaaactaatgtcgttgcagaaccaaccaacgaatattcaacacggtctgctactaggctaaacacagcagtgaccatcaggctgtaaaggaaacctgatgccatcgcactaattgttagtaccattagattagaaggcaatccaactccaagcaatgttaaagaaaataagacgaggcagattggaattaattgtttatgaaacatagctatcaactgaccaaaactcatacctgctattattcccataagcatcatcgcactaagaacaagactagcttgagctggcgtacccaaaccaaattctactactagcagaggtatcctaagattaatcccagtatttatagttatgacaaatcctgctaaaatagctaaggcgacaatataagttaaatcagctttagggattttttgacctttagttttaatcttgtcatttgtatctttcaccactttcttaggcgcaaaaacaagatatagaactaagattggtaaagctaaaaaataaatcataaatgatttggaccaaccaaaagtcaacaacagcccaactaaagctgtcaaaccagcatttcctaaaacttcaaaggacccccttaatcctaagagttttcttctttctttgccttgataatattcactaatcacactaatggccctagtattaataaaaccaataccactccccaataaaagacgcgatacaaatactaaaaggtagttctgactgacaaccggcaatcctccccctaatgctgttagcaatagcccaaagataatcatatgtttctcagaaagttttttacttaaccaaggtgtgataagcaagatgaagataatagccatcgaaggaattgaaaacaataattcaacttggggtgatggtaagcccttatctctataataagatatcatttgtggtagggctggtgatgtcgaaaaagttgatagcaagataagtgataaagagagtaaacttagcttctccataaagattttcaagtgacaatacctctttctgatgtctttttttagataaataaagtataatcaatattaaactagaaatatatgacatatgtcctaaaactatctcaaatagggagtcaatacatggatatagaaaactactgccaagactactgtttggagactatctttccaaaacattatttcaaggatttacaagtaatcaccctaactgccggccaatccgtctgtaaacagggagaacaattagaatacttgcactacatcgtcaagggacgttttaaaattgtacgtcgactctttaacggcaaagaacatattttagatattaaaacaaaaccaacactgattggtgatattgaacttttgactaatagacaaattgtatcatctgttattgccttagaggatcttacagtcattcaattatcacttaaaggacggaaagagaaactgttaacagacgcaactttcctcctaaaacttagtcaagagctagctcaggcttttcatgatcaaaacatcaaagcgtctactaatctagggtataccgtcaaagagttacttgcaagtcatattttagcaattgaagaacaaggttactttcaacttgagttaagtagtttagctgattcgtttggcgtcagttatcgtcatttattaagagttatccacgatatggtcaaagaaggccttatccaaaaagaaaaaccaaaatactttatcaaaaatcgtttcgcactagaatcattaaatattcagccatgaagcgtagctttatcatttaattattttatgctaaactaaatcagagaatacagttaggagaaaatatgtctgctattgataaattagtaaaagctagtcatttaattgacatgaatgacattatccgtgaaggcaatccaacccttcgcaaagtggctgaagaagtcacattcccactttctgagaaagaagaaattctcggagaaaaaatgatgcaatttttaaaacactctcaagatccaattatggctgagaagctaggcttacgtggtggtgttggtttagccgcaccacaattagacatctcaaaacgcatcattgccgtccttgttccaaacgttgaggatgctcaaggaaatccacctaaagaagcttatagcctccaagaagtaatgtacaaccctaaagttgtatcgcattctgttcaagatgctgctttatctgacggggagggatgcctatcagtagatcgtgaagtacctggctatgtcgtccgccacgcgcgtgtaactattgaatatttcgacaaaactggtgaaaaacatcgactcaaattaaaaggttacaactctattgttgttcaacatgaaattgaccacattgatggtattatgttttacgaccgtatcaatgagaaaaatcctttcgctgtcaaagaaggcttacttattttagaataaggacaaataacctagagataattttctctaggttttattttttaatagcaaataaaataagaaatcttttttaaaaagtcgactctttccaaaacatctggcaatctacaatctgttggttatcgacggagtcatctccttcaatacgattaatcaaaatctgtgctacttgttcaccttcttcataagccggctggacaattgttgacactttaggagatgaaaagtctgtccattcaatattgtcaaacccaactaaaccaactcgtggcatatcaaaattgagattcttcatggcagtaaaaaccattggtaaagcccaacaatttggtgcaaatactaatgtctcctccttatctggaactaccgcttttagaaagtcttctatatcactttttgaatgatcatcatcttcaatcaccaaagtgtcataaccgaaaccattgtcctttaaagcatccatgaatcccgaagctctctcaatacgtgtactaagcaagctcgtatcagcagtaatcataataaactttttataccctcgatttagacactcctgtgtcatatcataaacagcatcatagttattagccttaacccaactcgtcttatgttcataaagttgactatcaaaaaataccattggtttctttttttcttttaaaatacgagaatactttcgaaaatttgatgtaggctgaataatgaaaccatcaacacctaaatttaacatattttcaatataatcttcttcacttttggcatcgtaattactattacccacaataatttgatagcctttttgtttggtgatgtgctcaattccttttacaatttgatttgaaaatgtgtttgttatatctccaattaagacacctagtagttttgtttttttagaatttagacttcttgctatcgtacttggtctataacctgtttcatcaatcacctcttgaatacgttgcctcgtctcatccgacattttttcaaatttttgattcaagaaaaaagaaaccgttgttttggaagtttttgataattgagcgatgtcattaatggtcatttttttagacataacaaacctcctttctaattttactaattttatttttttatggttaatatagtactagtatagcataataatagccctcttaattttttaaacgactcattttgccattatttttatcatatacaatgacttttcctttgcattttatcccttgcatcaaatagagtttatccccaaagataatatcatccataagcactccaattaaataatgaaagtcttgagacctaatatcaaatgcaatgctattacttagttccttatgactgttcgtttgcactaaaggaacatatttcacctgacagttccgatcaactatcaaggtataatccatcacctcatcaacaaattttattttcttaactaatttatgactttctgtcaattgattataccgcttagaaataaggcaatcttctagattaaaggtcgtaggacttactaatttcaagtcattaacaaacccattttcataaatgacctgatcatctaaaatatattgatttgttaagacatgctctcctggacaactcaccttatcaataactaaggtaatggcctgcggtaaagttaacaaccatcgcttatggtaatagatatcagaagctctttggacatgtagttgtccttcgactaaatggtacctatcctttgaagtcaactgacaatagtcacattttggataagaattgtatgtccaagagtccttgatcatttctaagggttgcccatcaagggtacatgttgaatgactagtcgaacgtttaaaatcataccttagttgttcttctttgtaagtatatcttcctgcatcaatgaaaataggtttctttttatcatagagacaaacactattattatcactatgagtatgagcgctaccaaatggaccgttcttaaaaaatatataacgcctatcatcacgtaaacacacatgaccagaatctggaaaaagataagcagactctcctattgtcgcacgcggtatttcttcaaaaagataaattgatggcttcccaaacaaaagtaaagtttctaaattaacattatcaaaagaaaatgattttgttttagaagatttcaacacaagtgttgccaaagttagaatatcacgagtatcggtcacatcactgtcccctatagctagttgacaataatccggaccagtcatagcaattagataggtaaccattttttcaatagtttcttctaatggtagataatatttaggcgcaaggataactagttccattaaggacttcaagacttctacatgatacataattgattgttcatactggctcccgtcatctaaaatttgaagcttgatttgaagtaataattcttcttcagcaaaactctgaatttcaggtagatttaattcatcttcataatagtataaacacgccaatattgctgttgtttgtaaaattccccagttacttagactatctttttcacgataatagtccctcatataagttatctgctcccgtaaactagttaatagtttaatttttttagtttctgttattaatccaaaataatctaaaaaaatcaaaactttgagccatgacatgcaacgtatcccagtgtcaatagtacgacttaccgccccttctggctttagtgtaaattgacaatcaatccaatggtacataaaatatttcatttgtctaaggtaagacttatcgccttcaacaatgtagaccaccaggaatttaaaaagataagtttgacgatttagcatatacaaccattctggatcatctgttactggcttatcccactccaaaggatcaagacaatatgctttagaacaaggttccatatcccaattatcattaaatacaaaagtgttcctcatcatcaaattaacagaggctttcatttcttgataggcattagattggtatgttttaatatacttttgacaaaattccctatcaaaatccttgaatttattatataagcgatctttcatttttttacaaaacgtcctcgtccgatataaaaaggactatgtcattgatatgtcataatccttatttatcaaaattttattaagctaaaatacctaaccagctaccaaggataccaataataactgtaaggataactaacttataagttgtccattttttatttttaataaggtaaaacataaggaaagtgtagagtgctggaagtagagctggtgcaattttatcaagcataccttggacagtaacaatcttttgcgttgtactagttactttttctggagcaaaagtgtaagggattgtaagcttaacttgtgttgcagctaaacttgagatgaccgttacaccaacgatattagctgcccgtgagataactgacatttgttcactcaatttatcaataaaactggtcccaagacgataaccatacatgccagtaactaatttaattcccgttaaaatagtattcatagccacaaagaacagaatcggtcccatcaccaaaccatctgtcgctaaagaggctgcaatcgttgagaacaagggtgctaagcaaaattgtgataaagaatcaccgatacctgcaagaggccccataagcgccatcttaataccgcgaatttcttcttctggccgctcattatcaagcattgctaaatgtaagctagttacaaaaggtaagaaatgagggtttgtattgtaaaactccacattttcttctagagctcccgctaaagcttttttgtcatctccataatattttttgagagctggatatatgacattagcataaccaagaccttgatagttactgtaattaaagccattttgtaaataaaaggcacgtaaagctgttttagtgtaatcactttttgctaattttttagatccagtcatcttggttgtctccttctgtcttagtttctttagtaggtgcagctggttttctgaaaatatcaagcaaagcaaatattgttgcaattatagctaccccgatagttggaaccccaagcacactgttagtagccactgatgttaaaactccgtctccatttgctgttggagttagaactggcaaaccaaaataaacagctagaacatatccaagtaggatataaggaatgagttcttttttagccattacagagagaatcatcgcaaaaccaattgcaggaagcattttcccagctaaggttagaccattaagcaaaacagggggaatgagagcaaataaatctgtcaaagtttgcgttgaaagagcacccagtactcctaaaccaaatcccaatccagcgaatgcccaaattgtaccatttgctgcaattttaaatcctcggaaattacctgcttgcaaagcttttttagctgtttcaggcgcccctgcaaaagcagtataagttgctgtttgaagaaattgaataccaactgcaattggggttgataatgcaagagcagcttccggtgtgatttttcctttagttccagctgttgtaatagccatcaaagttccaaaaatcccaggaccgattgggtttggaggaactgtccctcccgctcccacaccaaatcccatgtaagccagttcagatattgctccaactgccaaagctgtttgaatatctcctaaaataacaccaacgcctagagagagaacgatacaacgatttgtatagaggccaagcaacatgccactaaaacagaaagccgtccacagtccaattaagacagcctgaagaatactaatatccatatttttctcctttatatgatagtaagtttgtccaactaaatataatctaaaatattaacttccacagcaccatcgttacctgttggagttgttttagtattaaatgcaatgtgatattcttggtttaattttctaattatctctttatccttcatccctaagaagatagagcgacttacctgctctttaccttctccattatgaatatttccaatattaatctctttaattgggacgccccctgctacaagtctatagacatctttcaaatctttaacaattataaaaatcgtctgtgctgggttggccttgtgaataatatcaataactttttgaatatcaaaaaatcgcaatgctattgattctggcaccaccgtcttcattaacgtttgttgaagatgatctttggagacatcatcatttgccacaataacagtattacaacttaaaaatttcacccaaagttgtccttgtccatgaataagacgctcatcaacacgtgtcattacaatatttggtcctgctgccatttctgacctcctcgttttctattatttattgtttattttgttagtaaaatactcttaccaataaagttcccagtctttatagaatcttattaaggcttctaagtaataataatctccccaaatattaccttcatctactcctttacctgaatgccacgaatacacaccgtgcaatagaagaggacgtcctgctataagttcattattactatactgttcaatcagactacgaagcattgtatgcatagcatatttgtatgtctctttatcaggatctacttctggtaaatatttaagcatctcatgaattccacacacagccgttgctgttgcggatgtatctctaggctggcccgagccatccgtaaaaataaggtcccaataggataccttgtcttcaggtaaacgatttagaaaatagtttgtcatacctttaaaaaggataatctgctgataatctttcattttccggtaactaagcggaataccgtagatgccccatgcttgccctcttgcccaagatgactcatcactataaccctgtcgtgtgacaccttttaacggttctccagtttctgggtcgaaataaaaagtatgaaaagcagaagaatcatcacgcaccacattgttagctgaagcgtagaagtgattcaccgcaacttgtctatacttttcatcacctgtctgttcataagcaaaaaataagagttggatattaagtaagcaatcgataattaagcgatagtgttccttatacccgagttctccccaagcctgaataaatccacctttttcttgatagcgctccatcaatttatctgcagcttttatagtggcttctaaagctttaacatcaccattgatacgatattctgctgtacaagatggtgtgtaaagaaatcctaagtcgtggtgatctaatgctatacgattattaatacgatttagaaatgacaatacatttttgtgggctatgttttttaactttttatcctgattatactcataagctaaccacaagcaccctgtccaaaaaccatttgtccattctgtgttatccataactttataaatattattgaatgttgcaggcgttggatactcttcaccaaagtaatcaatattaatataaagttgcttcaaggctttttcaatcgcttcctcaacttcaatcttagttaataatctactgtttaaaaaacgctttggattttcaattgactcaaccttgaccggttttattttcatcattattaaatgcctccctcaaaagttgcttctgcagtttgtgtagcaaggcaagtagaaaaatcaacaattccttcatgagatgatgttataactttatcaacaagatcatctacatgttcaaacatcgttctagataaaacagcttccattaacattgaaaggttcaagcccgataaaacttttatctttttatctgtatattctactgataaggcggaagaaacattgaaaggagtcccacctagcaaatcagtcaatactaaaatttctttgaaatcgataacctctctttgcaaagcaactctaacatcattagaagacatgcctgcaataaagttaataccaacaacatattcctgatgcccagcaataagttctaaagagcttaaaataccatctggaaagttgccgtgtgctacaataataatttttatcatattttctcctcttgagtttaccggtttacttttataatcagattatagcgctttcatttttaggtgtcaacatcttttttatattttttgagcagtttacttgattttttataatgatgtcttttttatctttaagaattataacctagataaatctttgttatatatgttgccaagttttatagaagaagaactctatagttgacaaaaccggtttactttgttactattcatgtaaacaggtttacttcctgaatttttttacggaggtcatattatgactgaacaattcttaaaagacaacttttcactagaaggtaaagtcgccttaataacaggcgcttcttacggcattggtttttcaatagcaactgcttttgctagagctggagcaactattgtcttcaatgatattaagcaagaactcgttgacaaaggcatctccgcctataaaaaacttggcattaaggcccatggctatgtttgtgatgttacagatgaagatggaatcaacgaaatggtggacaaaatttctcaagatgttggggtaattgatattctagttaacaacgcaggtattataaaacgcacccctatgctagagatgagcgctgcagattttcgacaagttattgatattgatttgaatgctccctttatcgtatcaaaagcggtattacctggaatgatccaaaaaggacatggtaaaatcatcaatatttgctccatgatgagtgagcttggacgcgaaacagttgctgcctatgctgctgccaaagggggacttaaaatgttaaccaagaacatcgcttctgaatacggttctgctaacatccaatgtaacggtatcgggcccggctatattgccacaccacaaacagctccccttcgtgaacgtcaagatgatggttcacgtcatccattcgaccaatttatcatcgctaaaacacctgccgctcgctggggtgaggcagaagatttaggtgcaccagctatcttccttgctagtgatgcatcaaactttatcaatggtcacatactctatgtagatggcggtattttagcttacatcggtaaacaacctcaataataaaggagtaatataaatgaaaattgcattaatcaacgaaaatagccaagcaagtaaaaatactattatctacaaagaattgaaagcggtttctgatgaaaaaggatttgaagttttcaactacggaatgtatggcaaagaagaagaaagccagctaacttatgtacaaaatggtttactgactgctattttacttaatagcggtgctgcagattttgttattacaggctgtgggacaggaattggagcgatgcttgcttgtaatagttttcctggcgtagtctgtggattcgctgctgatcctgtcgacgcttacttattctctcaagtaaacggaggaaatgctctttcccttccttttgctaaaggatttggttggggagctgaattgaatctgaggtatttatttgaacgtcttttcgaagatgaaaaaggagggggataccctaaagagagggctgtacctgagcaacgcaatgcacgtatccttagcgaaataaaacagattacttacagagatttactctctgttttaaaagaaattgatcaagatttcttaaaggaaactatttctggggagcatttccaagaatatttcttcgctaattgccaaaatcaaaatatagcagactacttgaaatctgtcttagactaaagcgtctgttttagaaaggacttttatgtctaagattctttttttcggtgaacctctcattcgcatcactccaaaagaaaatgactattttgcagatagtatctcaactaaactattctatggtggctctgaagttaataccgcaagagctctacaaggctttgggcaagatactaaactcctctcagccttacccaataatcccataggtaatagttttcttcaatttttaaaagcacagggtattgatactcattctattcagtgggttggagaacgtgttgggttatattttttagaagattcctttgcttgcagaaaaggtgaggtggtctacgaccgcgatcatagtagtttacatgactttaggataaatcaaattgatttcgatcaattatttgaaggagtttctctctttcattttagtggtattacactatcattggatgagtctatccaagagataacactgcttcttttaaaagaagctaaaaaaagagagataacaatctccttagatctcaattttcgcagtaaactaatttctcctaaaaatgccaaaatccttttttctcagttcgctacctttgcggatatttgttttggtattgaacctcttatggttgactcacaggacactaccttcttcaatcgcgatgaagctacaatagaggacgtcaaagaacgaatgatttcgcttataaatcactttgactttcaagtcattttccatactaaacgtctacaggatgaatggggacgaaaccactaccaagcttacatagcaaatcgtaaacaagagtttgtcacttcaaaagaaatcaccacagctgtaaaccagagaattggaagcggagatgcttttgtggcgggagcgctatatcaactacttcagcactcagacagcaagacagtcattgatttcgctgtcgctagtgcatctttaaaatgtgctttggaaggggacaatatgtttgagaccgttaccgcagttaacaaagtactaaatcaatcgaaagacattattcgttagaagggagaattatgataaaatcaaagattttgttgcaattaatgcaaggaaaaatagttgctgtcattcgtggaaatagccaagaagaagcttttcaagctgctcaagcatgcataaaaggtggtatttctgctatcgaaatcgcctatactaatagcaaagctagccaagtcattgaacaactagtcacacaatatactaaccaagaacaagttgtcgttggggcaggaactgttctagactcagaaactgcccgaatggctattttagcaggagcaaagtttattgtatctcccgcatttaatctacagactgctaaactatgtaatcgttatgctattccttatttaccaggttgcatgaccttatcagaggtaacaacagcacttgaagccggttgcgaaataattaaaatattcccaggaggtactctaggaacatctttcatctcatcactaaaggcacctttacctcaagtacaaattatggtgactggtggggtaaatctcacaaatgccaaagactggtttctatctggagtaacagccattggtattggtggagagttcaataaactagcagctttgggggaatttgataaaatcacagaaatggctaaacaatacaaaatacagctaaatctgaattaacacaataaaaagacaaggcacccccacacctcaatcatgagacagaagaaaagaacttttataaagccatttttctgtagtaccgtttatcttaatcagactcattatctcgattttcttatcagaccgagataatttttagctaatcttcctgtagacataaccgttctacttccgacaactgatccatgtcttcaccaaagatatactacttgcccgcagattgatataagtagtgaagctcatcattctcatatcatttcagcaaataatagatttgatatcatttttatatccaaaaacttagcaatgacctatcaggcttacccgcttttcctatctcaacacagactaacttagctcctatcaaatacattttttaaacataattaaaaacatttctgattatagtttattagatttcaacagaagtattttttctgcgtctcagcttttgagtgtaccgttattttgaagttttgatagttgagtgatatcattaatagtcgttttttagacacgctaaacctcctttctaatttgactgattttattttttataacgactcgttttactgttacatctctttataatcacctatttaaatagacgcatttaaaatcaaaattaacccaagatttttattgaaaaacattttttaatatgttattatttatttattaataaattaggagatttttaaaaaatgaagaaaaaagattaaaattaacttgtgtcttatcatttgctgtagcttcaacattattcaacctatctgatttaaatatatcatatgctaatcaaaataatattcaagaaactaatctagttgaaaaaaacagtgaagataagtttattcaagagttaaataggtataaaacagagataccaaatttcaaaggttttaatgtttggattttaggtgataaaggctattacaaaaaccttatcaatttagaagaaattaaaaatatccaagctacattaaaaaaagaaagaaatgaagaatatgtctttgtcaaattaaatgggaaaatcgcacatgatacaaccgtattcttgatgaataaaaaacataaattacttaaaaatatagaggaatttaagacgataacccaaaaaaggctaactgagagaggaaagttcccatatgataccgttcattctacgtttgaaattaaggatgaaaactttatcatggaaagattgaaatcatcagggttatctatgggtaaaccagttgattatatgggcgtaaatggtatccctatttacactaaaacattatctatagttaataagtttgcctttgaaaataattcaaaagattcttcatattcttcaaacattaatattagtgaagataaaataaaagaaaatgaccaaaaaattctagatttaatagttaaatctggagctaataatcaaaacttaacagatgaagaaaaagtaattgctttcactaaatatataggtgaaataactaattatgacaatgaagcttacagagctagaaatgtcgacacagaatattacagagcttcagatttattttctgtaacagaaagaaaacttgctatgtgcgttggctatagtgtaacagccgctagggcatttaatattatggggatacctagttatgtcgtttctggtaaaagtcctcaaggaatatctcatgcagctgtgagagcgtattataatagaagttggcatatcatagatatcacagccagtacatattggaaaaatggtaattacaaaacaacgtattccgattttattaaagaatactgtatagatggttatgacgtttatgatcccgcaaaaacaaataatagatttaaagttaagtatatggaatcaaatgaagcgtttgaaaattggatacataataatggaagcaaatctatgttatttattaatgaatctgcagctctaaaagataaaaaaccaaaagatgattttgtaccagtaacagaaaaagaaaaaaacgagctgatagataagtataaaaaattattgtcacagattcctgaaaacacacaaaatccaggagaaaaaaacataagagattatttgaaaaatgaatatgaagaaatattaaagaaagataatttatttgagcatgaacatgcagaatttaaagaaagtctaaatttaaatgaatcattctacctacaattaaagaaagaagaaatgaaaccgagtgataatctcaaaaaagaagaaaaaccaagagaaaattcagtaaaagagagggagactccagctgaaaacaatgattttgtttcagtaacagaaaaaaacaacttgattgataaatataaagaattattatcaaaaatcccagagaatacacaaaatcctggggaaaagaatatacgaaattatctagagaaagaatatgaagaactactacaaaaagataaattattcaagcatgagtacacagagtttacaaaaagtctaaatttgaatgaaacattctattcacaattaaaagaaggagaaatgaaactaagtgaaaatcccgaaaaaggagaaacgaacacgaattaacctttcaaatatctacatcaaataacagaagtctctgtatcaagcgaattgtagcttttttgaatatactaaaaacactcctacctctattttactagaagtaggagtgttttttcattttagttcatagatgcagtgtcattgctatccttgcctttttttgtacagtattatccgatgactttaaagcggtcatcatcattcatgaattctttttctcctgtttcagcttcgattgaaccaaaatttagttgtccacgaagtttccaactagctggaacaccataaacagcttgtactgatgcatcaataactggattgtaatgttgtaaattaccaccaagtccaagttctgcagaaagggctgtccaagtatttactgaggcaatacctgttgattgctcagaccaaactggaaagttatccgcataaagaacgaattgttcttgaagagatttgacaacatcttgatcttcaaagaagagtactgttccctttgaagctccaaaactagctaatttttccttagttccagcaatagctgtctctggagcaccttgtactttcattgtttctaccaaatcattagcaaccaattcatcccagaacttagtaacttcatcattcaataaaatgacaacacgggaagtttgactattaaaagcagatggggattggcgaactgcctctttaataatctctactattttctcatcagaaacttctgtattgcgaccaagagcgtaaatagagcgacggttttttaattcttccaaaaatgacatattttttctccttgttcttcaatctcagatatcttactacatttgttctagtgacatatgaattagattaaagttatttattactatgtagtaattatattaccactatatcataaagtcaaagaatgtgactcacaaggttttaaatttttttaaaaggttaatcaagtcttcttgctctgtttctgttaagactgaaaaagcatcttctacacgtttaatatgctctggtagagctttttttatcacttcttctccttcagttgttaaactcaccaaaaaggctctcttatcattcggacaagaatggcgtaatacccatccctttttttccatatttttaataacaacagtcatattacctgatgtagcaagcatattttcaatcaattctccaattttcattgtgcctttagcatagagaacatccaaaactgcaaactgagttggtgttaattcaaattctttaaatgattctgagacttttccgtctattgttctaaatgcttttcgcatgacaaccatagatttaaccgctgaatttttaaagtttcccatttcatctcccaaacgtattttttcttattttatcactaattagttatttcaagcaagaatatcatctttgccctatcaaaagcagctggcaaataataaggttgagtagttactcaaccttattacttagaagaaatcatcaaaaagactcaactgattgtcttctggtaaatttcccaaaatacccatctcatcaaatttttcaactaaggtacttgagactcctcctcgtttacgaagctctgtttttgataaaaattcaccatcttcacgtgcccgaactatctgttttgcaacgttttctcccaagccttccatagcaacaaatggagggattagcgtatcctcttcaataataaagtcagtcgcatggctacgataaagatctaatttcccaaatttaaagccacgctcaagcatttcattaaccaactctaatgtcgtaaaaagatcattttcgacattcgtcgcctcattacgctgacgcttctcagtgatatccttcatgcgcgccttaacggcatcaagtccagcactcattgtgcgtaattcaaaagctttggcgcgaatagaaaaataagcacaataataaaatattggataatgtactttaaagtacgccacacgtaatgccattaaaacataggctgctgcatgggctttagggaacatatacttgatttttccacacgattcaatataccaatccgggacattattatcacgcattgcttggatataaccattacgctcatcttctgaaattttcaaccataaccccttacgcacgcgctccatgattgtaaaggccatctttggttgtaggccagcgtgcattaaataaaccatgatgtcatcacgacaaccaataacagttgataaggtagcaataccttccttgattaagtcttgagcattacctaaccaaacatccgtaccatgtgatagccctgacagttgcaacaattctgcaaatgtggttggatgggtttcgttcaccataccacgaacaaagttcgtaccaaactctggaataccaagcattcctgtaggagttccaatttgctcttctgtcactcctaaaacttccgtaccagaaaataacttcataacgtctggatcatctggaaggatatttgatggatcaattcctgataaatcctgaagtttacgaatcatagtaggatcatcatgtcctagaatatctaacttcaagacattctcatcaatatcatggaaattgaagtgagttgtctgccaagcagctgtcatatcatctgctggatattgaaccggagtaaaatcataaacatccatatagttaggaataacaacaataccaccggggtgttgacctgtagaacgtttaactcccgcagcaccagtcgctaaccgttcgacctctgcatcgttataaaatttattgtaatctcgttcgtaacctttgacaaaaccaaaggcagttttttcagctacggtacctaccgttcctgcacgaaaagcatattcttctccaaagatatcacgaacgtctaagtgagcagaaggttgatcatctccagagaaattcagatcaatatcaggaaccttatctccatcaaatcctaagaaagtttcaaacggaatatcctgtccatctttcttgtacaaagtaccacatttaggacaatttttatttggtaaatcatagcctgaaccacaagaaccatctgtgataaattcagaatgctgacaatttgggcaaacataatgaggtggcattggattaacttcagtaattcctatcatggtcgctacaaaactcgacccaacagacccacgtgatcctactagataaccacgttcattagaacgttgcaccaacatttgcgaagcaagatagataacggcaaatccattaccaagtatagatgctaactctttttcgatacgtaaatcaataatatcaggaagaggattaccatatatttcgaatgctttagcataagttaattcagcaactcgttcttcagcacgatcaacaaacggagtatagagatccccttttacaacttcaacgtcttcaaatcgatctgcaaaagtattcgtattggttacaacgatctcataggctaaatctttaccaagaaaggcaaattcatctaacatctcatttgttgtgcggaaatgtgcttttggcaaaggcgctggctgagcatcctccccacgacctatagtcctattaatcatggcaccttgtccaagactacgaacaataatctcacggtaaatctcatcttcaggctcaatataatgaacatttcccgtagctaaaacaggcttatctaaacgccgaccgacctctattaggtctctaataatttgttgaatccccacctcatctttaattaaatcacgtactaccaaggggcgataaatagcaggtggcatgacttcaataaaatcataatatttagctagggtcactgctgcatcaattccatttgataacaaggcatcaaaaacttctccatcagaacaggcagtacctagcaagagaccttctctgtgagcatctaaaactgacctaggaattcttgccaccccttcaaaatatttaacatttgaaaggctaactaacttaaatatatttttaagtccaacctgattttggacataaatggttgcatgctttatgcgtgcctttttgtaagagtcttcagctaccaatttagtattgagctccatcaaattagtcacatcacgattttcccgcgcctcttttaagaaaataaagagtaagcgacccgttgcttcagcatcgtagttggccatatgatgatgttccaaagcaacttggaaacgtttggttagaggccccaaaccatgacgcttatattcaggataaagatttcttgcaaattctaaggtatcaatgaccggctgtgtgatcaaaggcagattatgacgttcataattcgcattcataaaaccaacgtcaaaggttgcattatgcgcaactaaaaccgtaccttgacaaaaattctgaaattcctgaaggacttgtaaaataggttttgaacctctgacatgattatccgtaatacctgtcaattcagttgtaaaggcagaaagaggatgacctgggtcaataaactcatcaaattgctcaataatattacccttgaacatttttgatgctgcaatctgaattaggtcattattagctgcagaaagacctgtagtttccacatcaaatacaacataagttgcttcgtgcaaattcatatcaacttcgttgtaggaaataggcactttatcttcaacaatatttgcctctaatccaaaaattgcttttatacctgctttttttgctctgtggtagccatgcggaaaactttgaacattggcatggtcagtaattgcaatagctgggtgtccccacttagctgcagtatcaatgaggctctcgacagttggtaaagcatccatcgttgacatattggtatgagcatgaaattccacacgtttttgatctgctggcattaagtctttacgttcatgatgcacaatctctttgatatcttgaacattcattgtcaaagatttagtaaagttattgttctcaatattccctctgactcgcaaccacgaacctttagaaatcatatcgtacttcttcaattcttcatcatctttagcccacttttgcatagcaaaacttgaggtataatcagtcatcttaaaattaatgatatgacgtccagtgcgggttgtttttcgttcaacactaaaaaccattccttcaaaaacgatacgattttcttctgttgtcacctcaatcatgggtgtaatctctgctttttcaaagccagcttgacgttgtttgatacgctctttgaaatcataattttgagttggggtcacttcttctgatggaggcgctgaatcttctagtgatttttgtgcttccaaggcttgcatagcttcttggttagctttttcaagcaattgctcgcgattagtttcaaatgatgattttaagtcttgcgtcatttgttcatcagaaaccatatcaatagcaagtttaccaaatccaaacaatgaaaactgttgttccaaacgcggcaaatgattctgacgaaaatgattattattgacaaattgaggtgctgaaataatcatctgactgccattgtaatgaacttttaattgtgaaaaagaactcttaaaacttgcactattacacaagggttcacaaaaagcttgttgataataatcctgtagcagatcatcagaaaaatcaatagtttctgctcttatatcaaaagtagcctttatatctgctttttcaaaactattcactaaacgagtttgtaattcacgatacacctcaattggcaataattctggaaatgaaaaatgaaattcccataagcgtgatagagaatgaacctttacctcgataatatcagcagacgaaaaaacacttgaattcttaatttcaagcggcatttcaatctgatccataagtttcttgaacaattctgacatagttttctcctgaatatcttacttccattttatcacatatctgtaaatatttcgagataacaaaaggaggctgttaaaaaaggaatttattagccttcttaacaacactctcttaactgaaactatttatcataagcatctagactgtaggtttcaataatttggtttaatttactagcataagcagtatctgtcgcataaagacctgttagagctgcagtagcatccttataagaagaggtatttgatttccaaacagatgcatacttttgactagatactaactcagcataatcatatagtgaagcagaataatttggataggcgcgaaaaggagcttggatttgagtcatattgcctttcccatcatcttctaaagtaggcatttggacagatttacctttatattctcctttgatgccaaagaggttataattaggagccttagacaaatctgattgtccactggatgattccaaaatagcttgtgctaataagactgacgcatacaaatcataggtcttagaaatttcaatagctgttggagaaatcgtttgaataaaagtcgtcgtttgatccgatgcactagtgactgtcggttcgacattatcatttttataattataaaaccaaaccccacccaaaccaaaaaccaatagtgttgttgttaacctcaataccaatttatctttttttcgacttttcatgatggctcctttctaaaatatcatttcattataacaaaaggcagttgctttttaccaataagaaccatactaaatttcactccatataaaaaagttagcacatcagactaacttttttatcggcttatttttttgttagaatctctaaagtttcaattaagttatcagcgtgaacctcaatcgtatcaccacttgctttaattttcacttcaacgataccttcagaagctttcttcccaacagttactcgaattggaagtccaattaagtcactgtctgagaatttagaaccaacacgttcattacgatcgtctgtcaggacttcataacctttaagcatcaaatcagcttcaattttctcagtaaggtcttgtgactcttgatctttgacattgacagtaatcaaatgtacatcaaatggggctaattcttctgggaaattaatcccccaagcaaagcgataagctccttttggtgtcttattcacaaaaagtcgggcatgttgttcaatgacagctgagagaatacgactaacaccaataccataacaccccataacaataggatttgagcggccattttcatcaaggatgttcgctcccatactatctgaataacgggtacctagtttaaagatatgtccaatttcaataccacgagcaaatttcagagtacctttaccgtctggagaaatctccccttcttttacttcacgaatatcaacgtattcagctgtgaaatcacgttctggattaactccagtaaaatgataaccatcttggttagcaccagacacagcattagcaaggtcttgaactttacgatcagcaataattttaacagagtcaggtaggttaactggcccaagagaaccaaaacctgcaccaaaaatctcttttgcttgctcttcacttgcaggctctaagaaatcagccgctaaataattttttaacttcacatcattgacttgatcgttaccaactagtaaagcaaccacgggctgttcatcagcaataaacaatagtgtcttgatagtttgattttcatcaattgataaaaatccagctacctcatcaattgatttgcagttaggagtttctacttttgttacttcttcaaaggtagcagccttagtagatggtttgtactcattcgttgccatctcaaggttagcagcatagcttgattcagtagagtatgcaatagtgtcctcaccagaaactagccaagccgagagttctaccttaatttcttctaaaacatcctctggaatatcatcaatagaaggaatagttttatcaaggactaaccaacgatttaaatctgtacgattgggagttactgccataaattcttggctatctttacctcccatagcacctccgtcacctataatgcctttaaagtcaagtccagcacgtgtgaagatggcttcatatgctttacggtaatcttcgtaagtgacatcaaggtcttcataatctttgtggaagctgtatccatctttcatgataaattcacgtgttcgaagaagtccattacgaggacgcttctcatcacgatatttagactgaatttgataaaggtttagtggtaattgcttataagattttactgcatcacgaacaagagttgtgaaagtctcttcatgagttggtcctaagataaaatccgattgatcacgattctttaatttataaaggtcttcaccatatgtttcgtagcgcccagattcacgccataaatctgctgtaagaagagctggagctaacatttcaactgcaccaatcttctcaaattcttgacgcataattgttttaaatttttcaatagtacggttagctagaggcaaataagcatagattccagccgaaacttggcggacatatcctgcacgaaccataagagcatggctgataacctgagcatcacttggcatttcgcgaagtgttggaataagcattttactttgtttcattacaataagatacgactaatcaaagttgattctttttcaattgagaattgcaattgaaaaattcgtatttcctttcacgttttattatcttttagaagaaagctcgcatgatatcgttccaggtcacagcaatcattaatactaacataactgctaccccagcgagcgtaatataagtttctgtttcttgtttaagtggtttgcgacgaatggcttctaaaatattcatcactatcttacccccgtcaagggctggtatagggatgagattcataatacctaagttgatagagattaatcccattaagttgagaactgtgacgaaaccatttttagcagcttggctactagcctgatagagagctactggacctcccaatttattaatactaaaatgagcaataagtttctttaattcatttaaaattctaaagaaactttcccatgctagttttaatccacctaaaagtttgtctttaaagcttgtctttaaagctggcataatgccgatgatgtaggatttatcaactttctgtggcttaacgttgatcgttttcaccacctctttgctcttaatcttaagggcaagtttttgttttttttctaaatgcctagttgacttttctactgctgctgtcaactgttcccagttagaaactttgtgcgaccctatttgtaaaatacgatcattattttttaaacctgcactagcggcaggaccattttctgatacacggacctgattggttgataagtcttgaacacctccttgaataaaagcaagtgcaataaagactacaagacctaaaataaaattattcatcggacctgcaaaattggtaattaagcgcccccatacagaagcattctgatactgcatatctaagggagcaatacgaatttcagtaccatcctcctcaatgatagtagcatcgtgatcaacactataggtttttgtctcacttaagaccaatcctgtgatagttagtttatcttctaaatcataagctgttacattgattggtaaagaagtattgtctaattgttttcctgataaattaatacgagttacaatgccttctttatttaaagtaaggctagccggcgtccctgtcttaatttcagtcttatcatcaccccaaccagccatacggacataaccacctagcggtaatatacgaatagtataggttgttccttctttatcaatgtgagaaaagatttttggacccataccaatagcaaattcacgaacaagaattcctgatttctttgcaaaatagaaatgcccaaattcgtgaacaactacaatgacaccaaaaataataataaaggttaaaattcctagcattcaattcctctctaaatacaatatattattttagaataagccaaagaagtgcatgattgggaaaacaaaaatcatactatcaaagcgatccaaaatccccccatgacccggaatcaatttacccgaatctttaacaccaaaatgacgtttaatactactttcaactaaatctccaaattgaccaaaaatgctaaagatagccactaaaactaacatgactaggaagctatgaggcgcatagacggtcttatcaaaaagcataaaaaagaaagctaccacaatggctgaagcaatccctcctagactcccttcaattgttttatttggagacactgagggtagtagtttgcgttgtccaaattgacgaccaatcatataagcaccgatatcagtcgcccagacaataaataaagctaacaacaccttatctattccagccatacgagcactgactagattttgaaagccaatacccacataaaaactagacgcaattggaaaggcagcatcttcaaaactgtaagaattactgttcaaaacagtacctgccaaaatcataaaaataacaataccgtatgctgataaactagcgtcaactggtaaaaaggacaaataactatctaaaggaactgttaaaacaaaggctcctatcatagctaatgcaccttcaaaggaaaatatttctaaacgacgcatacgaagtaattcagaaacaccaatcatagctaaaagtccaactaaaaattggaaaggcaaaccacccattactaaaaaagggataaatatggcaagcgcgacagctccccaaataacacgttctttcattttctctcttctttctatacactaccaaatcgacgatggcgttgattataatccacaatggccttatgtagttcgtcttttttaaaatctggccataaaacgggagtaaagtaaaattcactataagctgattgccaaggtaaaaagttactcaagcgtaactctccactagttcggataatcaaatcagggtctctataaagatagggtaagctatttgtcattaaatgatttgctactaaatcctctgtaatatcgtcaggattcaacttagcttccaaaacatcctgagcaatttccttaatggcattagtgatttctgaacgtccgccataatttagcgcaaaattcaagacgagccccgaattatgttttgtcctcaaacaagcgcgttgcattgcatcgtatgttgccttaggtaatttatgagtatctccgatgacctgtacacgtacattatttttatctaactctggtacatatttatcaaaaaatttaaccggaaggttcataataaacttaacttcatcatctggacgtgaccaattttctgtagaaaaggcatagacagttagtactttaacacctaatcctgaagctgctattgtaacttcttgaagagcatccatccccgccttatgtcccataacgcgtggttttaaacgtttttttgcccaacgtccgttaccatccatgataataccaatatgtgctggtattttctccaaaggcatttctacttgtttttttcttttaaatataaacataatgttccttaatttagcaatcgtttttcttatcagcccttttaaaagagctggaaatatcccatactataacattttaccacatttcaacttatttttgagtattaaaatgccatttgtgacagcaaactaaaaagaccagaacaatcatctggtcctacatatcttattcagtttcgatggctgtttctttattttcgtcttcattgacttcaataatcttaacatcttcaactggttctgttggtgttgctgccttagagacaacagatttgatagctgccaactcaaacgtcaaatagacaccatcaacatctaaaaccattcgttgtgcttcagtattaacttcatcaactactccaaaaagaccaccaattgtgacaatttcatcacctttttgaacagcattcaattgtttttgacgttcttgtgcttgtttcttttgctgacgttgcatgaagaacatcataccaaccataacaacaagcataataataggtaagctcatttgattctcctttccgtgttctacgtaatcattactatagcagatttatgctatatctgcaaggagatactgtctcttagccaataaattcacggatttcttcttttgtcatttttgaatcgcacttcaccttgatagttccgtttttaacaaccatcaaacctggcactgtaggaatgtcatatttatttcgaaattctttatttgcagtccaatgatcaaaatcttcactatctaaatggaataattcaaattcatcttcatcagctacttctacaattttaggaacaaagaggtgacaaaatggacaagaaatacgaccaatgaacagtacaaaatcttgatttgaatcaattttatcttcaatttcggcagccgttatcaaagtcatggttgccaaaagttcttcaaaagaatacatagttaaccaactttctaaatcttatatttaaagaataacctatgatggcaaaacttgcaaggcaagagtaacaacgatcctatcaaaatcattaactcacttctcgcttcaaactatcctcaaaaatgctcactcatatttaaatgactcatcaaaaaaactgagcatagctcagtttttattttacaccttatttttgtacagcattactgacgcttttagcaactacatcggccacatcattttgaaaagcatttggaatgatgtgagttgtgcttaattcttcctccggtattaaactagctatgcctctcgctgccgcaatttgcatttcaacagttatcgtttttgctctagcatctaatgctcctctgaaaatacccggaaatgctaaaacattattaatttgatttggaaaatcactacgaccagttccaactatgtaagctccggcttttaaggcttgatctggataaatttctggaataggattcgccattgcaaatacaataggtttatcagccatcttggaaatccattctgcatgtaatgcttccggagcagaaacacctataaaaacatcggcattctccaaagcatcttctaaggatccagattggaattctctattagtcaattttgcaatcgctttgtgatgaggggctaatgactcccgatctttatcgttaataatgccaaatcgatcaactaccgttacatgttttgctcctgctgatagaagcttccttgttatagataagcccgctgaacctccaccattaacaactactctgatgtcttcaatgtcttttttaactagcttcaaactgttaaacaaagccgctaatactacgattgctgtaccatgttggtcatcatggaaaactggtatatcacattcttcaattaggcgttgttcaatttcgaaacaacgtggtgctgaaatatcctctaaattaatccctccaaaagtcggcgaaatagcttttactatagaaataatttcctctgtatcatttgttttcaacacaattggcacagcatctacatttgcaaaacgtttaaagagtgctgctttaccttccatgactggcattgctgcctcaggaccaatatctcctaatccaagaacagctgaaccatcactcactacggctactgtattttttttagtcgtcaactcatatgcaagctccacatcctctgcaatagctgatgatactgacgccacccctggggtataggcaatactaagatccctcttatcttccaccttaacttttgaaattacttctaattttccaccattttctctagcttggttgatagctaattgacctaaattttcactcattttgataactccttttgataaatattagaataacatgcgtaaaatggctgtcattgtgataacagtaatagctcctcctaaacgcgtagcaacttgagcaaatggcatcaagttcattcggtctgctgtacttaaaatggcaacatctcctgttcctcccataccactttgacaagctgaaataatacctgcttcaacaggattcatattaaggaatcgcgatacaaagaatccaacagaaataactgtaaatacaacactaataacaactatgaaatattgtatgctaagcgttgccacaacatcttttaacgggatataaagcaatcctagacctgccattagaggaaatgtaaaattaccagaaataaatttataaagttgcttagctccattttgtgtttctctaggaataacattaatatatttcaaaatagctgctgcaacaatcattaatacgggaccaggaaatccagttaattgctgcaacaaatgtccaaaaataaagagactacatgctgttaaaacacctccacccattttcttaacgtcaattgggccagaatgatcagcaataatatctgacatgtcctctcctttatttaaccttactaattgcccttgaccagacaagtgtggtttcttttctcccaaacgattcaatagtgcagtacataaaatggcaaagaaattaccaataatagtggctgggatgagttgagcaactagttgttcactagctacaccggtaattgaactatagcctaacgataatggtaaaataccttcaccaataccaccagctaaaacgggtgttacgatataaaacaaagtgtgtcgccactctaagcctaaaataacaccgacaaatgtccctaccatcatcgcacaaaccattcctaataacatggggaaaatcattcttagcaatccctgaatcaacattttccgattcatccctaaaatactaccggacactaaacaagcaatataaaaataaagaaagttagcttgcttcatcaacatatttgttgattctaaaacatttttattaatgaggttgaaaaacaccaaaatagatggtactaataaagataaaatagctgggccaccgaagtttttaaaaccaggaatgctagctccgatagtccctaagaaccaccccattgttaagataactgcaaatcctcctagcatattgactggcaatttttgtaaaaagcctgctagaagaatcaataatgctaaacaaacatatactggtaggggaactgaccctatcttaatatgaaatagtttagcctttaagtcttgcttttgacctctagaatcctcattattcactaccttcacgtctgccatgaaagcacctccttttacttcttatgtacagtttactttgggacttagtgataaggaagtttatttaagtaattgaattatttcaacttatttaattaatttaagctggattctagtttttaggctatgttatactaaactcggagggtgctgatgaaaaaaaaactatctctttgggcatttctatcattgattttagtcactatgaccatttgtatattttctattttttattatgtcactatacatcagtcctatcgtatggtaagggtacaggaagaaaaaatcttaaaaaatactggttatgctttatcgagaaatccacaagttatacaaacactcaaagataatcactatgatcaaagtctccaaaaacaaatgttattccttagcaaaaaatcaaatttagactatattgtccttataaatttaaaagggatccgttttacccaccctgactccactaagattggtaaaccatttcaagggggtgatgaacaagctgtttttaagggaaaagctattatgtctactgcagaaggttctttaggaaaatctttacgatacttaattccagtatatgatcaccaaaaacaggttggggcaattgcagttggcttaaaattaacgacacttggagacttatctcaaagtagcataaaagagtttagtaagcctctcttgattagtattttgattagcttagtcgtcacaagtataatttcttatggcttaaaaaaacaacttcacaacctccatccaagtgatatttttcaacatttagaagagcgcaatgcaacactggaccaaattcaagccgctgtatttgttattgaccagaggcatatcatcaaaagaaataatcctgcagctagtttattattcaaaaaagaggggcaacgagacctattttcaggtaaattattagaatctttaattcctcaactcaagcaggatcatttttcaaaaaaaactgaacaagtattacattttcaaggacaagactatttactatctatctcgccaattacggttaaaacacaaaatagaggctatgttgtcttcttaaggaatgttactgaaacacttttcactttggatcaattagcacacactacagcttatgcttctgcgctacaggcccaaacacatcaatttatgaatcaacttcatgttatttatggacttgcagacattgaatactacgacgagttgaaaatttatttaaaagaattattggagccacaaaatgaatttttagcacgcttatcaatgttagttagagagcctcgactggctagtttcattattggcgaaagagaaaaattcgcagaaaaacacatcaatctatccacagaaattttagtagaaatccctaccaagtcaactgttgaggatgttaataactatctcttgctccacagatatattaatacgaagatactcacgctattaaattcaacgactttagtttctttacgtttaaattatcaaaataacctcattgaaacagattatcaatgggagaatgagaagtggttactcaatgactaccatcagtatttcaacgacgcttattttcaacagttacttgtagattcaagagctacttataagatctctttaaaacaaaataaggttattataagaacaaatattatctactcagaagggccttagtatggacgtattaattatcgaagatgatcctatggtggaatttatccaccgcaattaccttgaaaaactcaattattttcaaaacatctattcaactgctagtcaaacacaagctattgcttatcttaatgacattaaaatccaacttgttcttttagatattcatattaaagaaggcaatggtctagaattattaaagttattacgcaatcaacaccaaaataccgaagtcattgttatttcagcagccaacgaggcgcacactgtcaaagaagcatttcatttaggtattgtagattacctgataaaaccatttacatttgaacgctttgagtctagtattgaaaaattcctaaatcattatcatacatttgaagctgataaaatctatcaagacaacatcgatcactttcaaaaaatagattctggatggctagagggagaggttaaacttgatgagaaagggctctctgaaattacctatcagcatattcttgatgccattcaagagttagagcagcctttcactatccaagagttagcaaaatgcagtcaattttctcatgtctctgttaggaaatatattgcctatatggaagaaaaaggccttctgacaagtcagcaaatttatactaaggtcggtcgtccttacaaagtttataagcttataaaaaaaaacttaggcctgtagacctaagtttttttaatcttcgtagccatttggatgactagaatgccatgcccatgccgatgaaataattttatcaatattatcaaatttaggctcccacccaaggatttgacgagctttctctgaggaagcaataagcgtatctggatctcctggacgacgagctgccttttgagcaggaatttctttcccagtaatacgacgagctgcctctaacatctgaaggttagaaaaacctgtcgaagatccgagattaaacacgtttgattcattcccttggcgaaggtaatcaactgctaatatatgagcatctgccaaatcaaatggatgcacataatctcgaacattagttccatctggagtattgtaatcatctccaaaaatcattattttgtcacgtactccttgagcaacttgaagaatgattggtaacaaatgtgtttctggtttatgatcttccccaattgagccatccggtttatctccagcaacgttgaagtaacgtagagcgacaaacttaataccgtaggcttgatcagcccatttcataattgtttccatcataagcttactttcgccataaggattaataggattttgaggagctgtttctaaaataggaacttgttctggaataccatatgttgcagctgttgatgaaaagacaatatttttgatatcacattcattcattacttctaaaagttttatcattccagcagtgttattatcaaaatattttaaaggattttccattgactcagcaactagtgaaaatgccgcaaaatggataacagcatctacatcaggattttccctaaaaacttgacgcataaacgttttatcggataaatctccttcataaaaaatcgcatctgaatgcaccgcttgacgatgacctgttaccaagttatcaacaacaataactttctcttttccttgtgtgattaactgatcaaccatatgcgagccaatgtagccggcgccacctaaaatcagaactgccatatttttctcctatttcaatactcttttaacatcatttgttacctcattatactgagaataagctttttttgcaaatatctaccgaaattagaatagctctatgcagaaggcatcccacggcttgagagtgttacttgatagtacttcttgaacctctgtatttgaaataatagtttctttaacagcttctggaaattcaaaagattggttttgatcggataagttcgcaactattaaataacgttctttatctgtttgacgaacataagcaaataccttatctgctgtttccaaaagtttaaaatcagcatcaactaaccagtcgtgttctttacgtaaagcaactaatttttgataagtataaaaaatactttccgtatcatttaacgctgcctccacattaatttcctgataattgggattgactgctagccatggggtacctttagtaaaaccagcttgatgttcttgactccactgcattggagtacgagcattatcacgaccgactttacgaatactatctaaaattgttgcttcagataccccattatccatggcttctttagcatagttaagggattcaatatcatctacatctgctaaacactcaaatggataattagtcataccaatttcttcaccttgatagatataaggcgttccacgcatcaaatgtagtaggattgctagagccttggcagattgttttctgttatcactatcatttccccagatcgagagcactcgaggaaggtcatgattattccagaataaagaattccaaccttggccaagctccaattgtgtttgccattttgtaaaaatatctttcaatgctggaacatctaatccgtcactgtaatcccacttaggagcgtcaggtttatgttgaagacctacatgttcaaattgaaagaccatagataattcttcattatcgggatttgagtattgttttgcaatgtctggcgttgctccccaagtttcacccaccgtcaataagtcatgctttccaaaactagctctgttcatttctttaagataatcatgaagttttggtccattaccagtaatgcccttatctggaattttcccaattaaatcaatgacatccatacggaaaccaccaatacccttatcaatccagaaattcatcatatcataaattttatgacgtaaagcttcattctcccagttgagatctggctgacgtttgctaaaaaggtgcaaataatattgacctgatactttatcatattcccaagctgagccactaaaaatagaagtcaaatcgttaggttcatctcgccaaatataaaaatcacgttcaggactattagggttttctcgcgcttctacgaaccaagcatgttcatcagaggtatgattcactaccaaatccatgatgattttaatcccgcgttgatttgcctcttgtaacagttggtccatatcattcatatcaccaaaaatatctgcaatggcttgataatctgaaatatcataaccattgtcatccattggactttgataaacaggtgataaccagatagcagtaatccctaatttttcaaggtagtctagtttgctagtaatccctttaatgtcccccacaccatcaccatctgaatccataaatgaacgtgggtaaatttgataaatcgtagctttatgccaccagtgtttcttcattattcttctcctatcaataattcattcatcttttattttaacgtttttcctcttttagtgcaagcgtttgcgtaaaaacattataaaaaggctggaacccaacctttttatgaatatcgcttataccttaacgaatagcttgttcagtatctgcatcaaagaaatgccccttagcaacattaaacgttaggttaactttttctcctggattatggaagtcacgcgcttcaacacgagaagcaaattctgtttgacctaacttaacataaagcatagtttcgctaccgagtaattcagaaactaaaacttctgcttcaacattggcatttggataagtatcttggacaagaagattgcttgaaatgtcttctggacgaataccaaaaatcaattcttttcctttatagcctcgtgattctaaaagtttttcttgaccttcagggatagcgattcgaagaccatcttcactaataatcataccattttcaactttaactttgaagaagttcatagatgggctaccaatgaatcccgcaacaaatttattggcaggaagattatagagttcttgtggtgaaccaacttgctcaattttaccaattgtaccatcaccatcagggttcttagtagctgacataatgacaatacggtctgccaaagtcatcgcttctgtttggtcgtgggtaacataaatagttgttgaaccaatacgttgatgaatttttgcaatttcagcacgcattgaaacacgtaatttagcatctaagttagataaaggctcatccattaagaacactttggcatcacgcacaatagcacgtcccatagcaacacgttggcgttgtccacctgacaaatccgcaggtttgcgctctaagaattcagtaaggccaatattagctgctgcttcacgaacgcgcttatcaatttcttgttttgagaatttacgcaatttgagcccaaaagccatattatcgtaaacagtcatatgtggataaagagcatagttttggaaaaccatagcaatatcacgatctttaggtgatttgtcattgacaacttcgccatcaatcttgagctcaccttcactaatatcttcaagacctgcgatcatacgaagtgttgttgatttcccacaacctgatggtccaacaaaaacaataaattctttgtctttaatatccaagtcaaagtcttcaacagaataatgcgatgcacttggatattttttgtaaatatgatttaaatttaattctaccattagattgacctcttttattattgtgattttattatagcaaagaaagggttttcatataatggtaaccttgcctaaatttcttgtgcaaactaactaaattttaggtatccatcgaaatcaaataggcataggctaaatcatctaatatttttaaattaagtcccgaagattgggtaaatttatctaatttatattgcaatgaattccgatgaatgaaaagtgccttagccgttttagcaagatttccttgctcttgccacagggcttttattatagccgaagtatcactcgtatcaaggatatgttgtaaacattttgctttaatagaaggcatgggcgattgatttgccaaagcccataaagccatctttggaaatcgacagtaatgttgttcggccttgtgactaagaaaaagcgtaaaaagtttatattcttcttcatataattctttccagtccactgcttgtagatgcgtccaactatttccaaaatagcaccttaaacgcgtgttaaagtcattttcaatcgttggtaaaatatctgttagtaattccgtagcattaaagaaattatcctgatttaaaatcatgacactttgggtttgattaattgtcataattgtttctacgtttattactaaaggcgacaagaaatccttaagttcttctgataaggtaaattgatgctcaataaaaataaattggactgccgaatgagattggggcaaccttccacgaccttcaactagatagcggtaccaaggattctgagaatccactgaactcgcatcttccaggcttggtgtcatttgtaataagtatagttcacgcttagttagcgaagattttggaaagtggaggacatgaccatcttgctcaacgatgatataatcctcactctgtttaacttcctgtttagtaataacttctggaaacagttccttaaaatccatggcatcctccactacagttttgttcattatatcatatttataacctctttttgagcacagaaaaagaggagaatgtctcctcagaaaatttctgttataaaatagtgatccgaatagaatgctgtttcgactgctttggattaagccgtacgatattttgtttatcttctaaaatatcagactcttcaatagaagttgacaaagaactccagggttccaaagccaaaaaaggaccaccattgttacttgtccaaagaataagattctcaaaatcatcaaagtcaagttggattccttttgcatgatttctagattttaagtaaaccgtcttagatcgtagttggtctaaagtaatagcatctttttcaaataaagcatgattaagagataattgtttttgattttctaaaaaaggatgtctagcttgtaaatctaacaagcctgtatccggaaacgactcaggaattgtgcaagtttcaaactgttcaaactctagatagtaatcactaaatacttccttttcaaacaaagggcaattaaagcctgggtgagctccgatagcatatggcatatttttttctgattctaagtttttgacaatatatgtaatggcaatgcttttatttcttaaggtgtaagttatttctaaactaaaacgataaggataatttatcaacatttctttactacttttaattgtaaaacgaacagaagaatccgatatgtaatcatagtcgaatgttttgtgacgtacaaagccatgccttggtatgatacccgtaaaatgtggagcttgagctggtctgtaaatgacgcaatcatttcgaacacttccgcatataggaaataaaataggagcttgcccaccccaataagtggcgtccccttgccaaaggtactcaacgccttgactatctgtaatagaagtcattgttgcacctaacgcttttaatgtcacttgcaactcatgattttgtatcgtaatagccattatttttcctttcataaagaacaataattgctttaccagcttttctctagcaattatctttccttccaagaagttgctgttttttgcaaaattttatttagttcatcaatattttgaaaacctattgtacgtaaccattgacgtgcaccagcttctcctttttcaacatactctttaacacttccagcccaagttgctctaccacaaaggacaccgttaaatttagcaccagcttctttagcaaacacaagagtctcttgaaaaagctgagcaggaactcctgcactcaaaaaaatgtaggggagtagtgtcgcctgatcttgttctctaaaatatgccgcagctgtcgctttattataagcagtctctccttgcgcaaaaccttctacatagtccatattgacaggcacttccaccttcaagacatcaatattaaatcgaggatttgaaaaaactttcatagcttcaataaccttacgtggcttaattttggcatactcaatacctgagctatccgtaatcttttcatcatatgacaaaatttcaaggaaaaaaggaatgtcttctgcaacacattcagaaccaatccgttcaatataagcttctttttcttcgtttacttcatccgaactatcaacatcataataaagtaagaacttaactgcgtctgctccctcttctttaatgcgtttcgcagaccaaatgtctaaacagtctgggagtcgcttggtactactggtatcataacccgttttttcgtacgcaagtaaaagaccggcattgtcatctaaaactttcgtagctggcaacccatattctggatctaacaacattgatgaagcgtaaggggttaattcttcagctaccaaaactttaagtgcttctatttgagaaacagtgggctcctcagattgatattttgccattaatcgcttcaatgctccacgttggtcaaaagccaaggccgaaataataccatttttatcactcaattgttccatatgtttttgtttttgttctgttaatcccatcctatacctctttcacttggatttgactgattaattcttgatagtaggtcagattgatatgccctgttaatgtttcttgtgcattaagcatacccaagacattagctctcttaagcaaatttgtatcatctagttgatgttccaaagcagacgcgattcctgcaaccgttgcatcccctgaaccaactggattaataacttctatttttggaatcgtcacttgatagtagtgattcccatgtttagcaaaagctcccctagcacctaaagaaacaataacccaatcaattcctctaaaaagatcttgctgtaaggtagattttaattcgtctaaactatagctaattggttttccaattaattgtgttaattcttcaaggttaggtttaatgacggtcggcttagcactagattttaaaaccgaacgtaatgcttctcctgaacagtctaaaacaactttcttattaaagtgattcgctagggagattaacctagcataataatctgaggggagtccctttggtaaacttcctgatactgttatgatagttgcagcatcaaagataagttttagatgattcaaaaaggcgtctgcttcatctttagtaatatgtggacctttttctagaatttcagtctgctgaccctcatgtaaaactgcaatacaatgacgtgtttctccaccaatacttaaaaattggtgtctgatttccaatgcatctaagccacttcggatgaaatctccaaaatccccccctaatagaccagttgccactacattatcgccaagttgagaaagaacacgagtcacatttaaccccttacccccaggtgttttggagacgtcggtaactcgatttacagtatccatgttaaagttttctaagcagtacgaaatatcaatagaagggttcaaagttactgttaaaatcatagatatctccttagtcgtgatattcaccacgattccatttatctaagaactctgtgaaaaagtcattctcttcttgatgggcattatgagtctcaacctcggctatcttttcaattaatactttgttttcttttgttggtttatatttagctcttataaacgcctcgatgatatctgtcattaacagcccaccagtaattttcccaccaaatccgataacgttagcatttaattcttctttggcatagatagctgatgtcaaatcacgtaccagagctgagcgaattcctggaactttattaacagcattattaataccaactccagttccacaaatacatacacctaagtcggcttttccactagcgacagcttctcctactttcttaccataaataggatagtgagtacggatattatcataagttccacaatcaataacctcatacccttttgtttttaaataatccacaactgcaattttgtcataagttacaatatgatcacaaccgaccgcaattttcatctgctttacctctcttacgcttagcacattttattcaacatatcgacccgaatttgatgacgacctgcatcgtaagtcccatcaacaaaaccctctactatatgtttagcaactcctggaccaacaatctctgaacctaaagtaatcatcctagcgttattatgagctctagtcatataagctgagcgttcatctgaaacttctgctgcaatcatccccttaaccttagtggctaccataaaaggaccaacaccgtaagcatcaaccattattcctaagttatcttctttttgattcactttagcaacgattgctaaggtattatcaacgaaatctttgctagtatccgttaaatcaataatttccttacctaaacttgtaaggtgttgtctaatcacttccttaagttcaacaccatgcgcatccgccccaataataattgtcatttctttctccttatttcacttttaatacaattgtatgtagttggaagatattgtttgtttttgtttgtaatatcatcatatatcttatttttgtttttgtcaatgttttgttttgtttttgtttgaaatgaacaaaaaaaactccgtgataactatgtcaactaaaattcactactagctagctatcacgaagtttgatacttcttattatttttatttgtaggaacgcttattccgcaagccataatcataaataaaatttaaacaaaacatgccaatttgctgccattttctcccataaagtgccttgcttctctgtattttgactaagaaaactccaattaaaaactttgtaatttaaagtaaaactattttgatgtttttctctatgttcataaaggacaccaaatttatcattattaagttgttgaacagagttgtaagcaaacgaaccatcttgaatgtgatggtgatataaccacttaaaactaccatttcgattaacttgcgctagacgtgcatatccatcttgacgcttcttacctggcccattagcattcactaataaaatatactcttttttgtcatgctcaaagcgaatagctgataattggacgtaagcatcatgaacttccttatatcgtttaacatggttttgccaagtctccccgccgtctttacttgtggctacttctaggttaccagttagattcctcataaataacttaatgtccccatttttcaattgaacgggtacggattctgtattttgttcttttttattatccattgttaaggagtgaattttttcaccattagaaagtatacggttatcattgactgcttttccagtatgccacgtttttccatggtcgtctgaataaattaggcgtgaagattgtgaacctcttagatgagatttccaattcgtagaataggcaggaataataatacgaccagcgtgtggcccccattttaaaactataccttttccaggtcctattcctaaaaatttcatgcctttctgacgaagacttgctgttatatctctaggtgatgaccatgtcctaccatcatcatcgctatatgacatccacacatagcttgattttgctaaacgaaatggtgacgttttatgttttgtaaaatatatatttccaagtagctgttttcccttataaatatcccctagatttgaatggtcacttttagtagtttctgttataacatgataatcagtctttttccctttaaaattatatacaatacctttgtcacggatagtaaaaaccttcgatttctttccattattatataaattaagataagactgtcctccgatttgggtatattctttttcaggtgtgttagcaatactaataacgcctcttccttctggaaacatatcatatattgaaaaaatacgtttcgtcttagagctagtatcttgaactaatgccatatccatattaataggtgagccactatagtcaccactagtaactagcggaactctagggttattacggagattgacaatagtttctctttttccccaagtgacaccatcatcctcactacggcgaataaccattcctatgtttccccaatcacaagcttgctcaattctttcatcagctcccacaagtaaagttcctttttccgtttttaataatgaggggatacggtaaccaaacacattatctttattttttctcccaaaatctcctcccctatatacttctgttttagcagaaagtatagcacctttaggtaatttgagctgatggtttagatgacaataatattgaaaataagattttatatcttcaaaattcaaattatcaacacagcaaacaaggcagtgtgccttagcttttaatttttgccataaattaccactatattttatttccttctctactttctctttgccaatagcaagcatcccctctataacagacgataactttccatccttttgagagaatgttttagtaagatggtgttcctgtatcgcattctttttaaagcccaacgatatctgactagcaatgtccgtattacctatgacattacttgtcgataaatctcccttaggaatgatatccaaagacctcaacttatccctttcaaaacctctatcctctctcgctgtctttctaaattcatcgctattaagtaatgcaaccgaataaccctttgattctatcaggaatctctgttgttctgcaatggaatgactgctttcgggtataatataggtagttctattattaggttgagttgcatttagttctgctaaatttgcctgtttacgattttcttctgtcgctatttccgattttagaggaggtgacaatttttcttgactgtcagaatcacctaagactattaccatatctttatctttttgatcatctactattaaactgtccgatgtatcagaatctaattctaactgcctctcctctattgaattagtaagcttatctaaagtagagtcaaatatgggaacagtagttttttcatcatctattgatataaaagagtttatatcagattttatttcctcactataaattgtactaggatgcaaaaatccacataataagataaaacctagcatcatatatgtactagttatcactcctagacggcgtatcgttatagaaggtttcccaaaggttaatgtcatagaaactccaagtcttaaaatattggttgcatacatcaactctagaaaaatgggagttcagtaatgtttccaaaaaggattgtataccaacttatcactattttcaatatatttttataattttactagttttttattattaagatgagcgaaaattaattatatatgttatttttaaaatctttaatatatcaaaaacctagaaaatataacattctcctaggtttttttattctatttatttttgattagctgcatattctgcattacggcgtttcatttgtttagcataccacataaacaaaccaagataagctgtcgcaaaaataattaatgttataatcgctgataattgacctgttgtcgctttaccaataacgtaaccaaagattttctccatagggccttctagtgtagagtgagtgataagtgaacctgctcgcgccccagctgggaatgcgcctacctttttagctaattcagttgcaaatggggcaatcattgttcctgataaaagaaatagcggtaatagcaatgttccaaaggtaatcatacgaattaaacggccacgtgtaacaaccagtaaagcaggggttacgcccattgcgataataccagcaagcggtagaataccattaccaactttagagagtaaaatagcttctactagcataatcggtgcaagaatgttagcacatgcccaaatctctgcacgtccggcaataaatggccagtccaaaccaatattgaaacgacgaccatgcattttaccattagcaaaattagtaattccttgagaaagtggttctactgcagcaatgaaccaagaaccaatcaaagagaacaactctaaacaagcacctgctgtaaaaccgagagaaaaccagccacctaatgctgcaaatgagaacacggggttgcccataatccctatgacaagtcctaaaatcataccaataaagaacttagagccccagaatccaatggctttatttaatttagccgcgtcaaagtcatatttatctagccctggaaaaactttatcaaaaagcttatccaaaaccataataatggggttcatcatataattcatatgcgttgaagtcatgggagaagttggacctgtccccaataaatcatcaaaggtaggtttcatcaaatcagaattgataatttttagaacaccaacgaagataatagctacagttgcaataatgacagataaaagtgttggtagattattttttttagcataccacataattaaaagacctgtgatagataaatgccaaatatcaaaaatatcaacatctaaggtatccgtttttttcataacaatcataacaatattgacaataagcatgattaataagaagtaaagcgtatatggtgatccccatgtaatagttgctaatggagcccaaccaacgtcaataatgcttagattgattcctgtatttttaacaaaagcttgaagtgattcagaaaaagcaccagttaaaataccaataatagcaccaatacccgtaagagcaatagctaacttaataccaccttcaagtgctttagaaaacttcactccaaatatcatggctaaacctgtcatgacaattagcatcacaactcccgaacccatatggataattggatcaaagaatttattgacaatatttaaaaatacctgcatgttccttctcctttaagactaattccaattttaaatatgttatgatagattgtgttctttgataacttgttctaaagcagtaaagaccggttcgctcataactggtatgcgataaagaataggtcctgcttctacaactggaattggtacattaaaacctaaatcagttttagcaataggagtaaagatatcatatttgttgaccatttcctcagtgatatccttaaccataacagcatcacaatgtacattgtaacctctatctcctaattgtgtctcgatagcatctttaatttgatgacttgagtttacgcctgcaccacaagctgctaatattttgatcatgttaaaacactcctttttctattaaataatgattaattttttctttattgtcgccaagctcatgtagccgatctaggtttccttttgtaataaagaaggtaatcaaattagataaaatatcactttggttactattcctactattaatgatgaagaaaaaatcctgaaccctacactcctcttctggattaatcatatgtttgaaagtaattggctgactatttttgacataaaagattctatctactagacaatactgcgtttcagtgtgtggaatagcaacatattgaataggagtcccatcttttaaatcaatttttaaccccgttggaaactctctctccctttcttttactgcctgtcggtagttaggactaacatagtgttgttttatcaatgcttttgatactaagtcaaataattcttcctgagaatgggcatcaataaataaaatatcttgagtcacagcaaacacctttcttcttagttaagcggttacatttttgttgtaaggcaaacaagccttatcaacttatctacatcaatattatacaaaacaaaataaaacattacaagacattttttattttattttgtttattattgtttattttttcaaaattattattattttagctctatttatggtatgatatatataacgaagaggtaggagaggtcattatgttaaagcgagaaagattacaaaaaataatagaaaaagtcaatataaatggcattgtcactgttaatgaaatcatggaagaacttgatgtatcagacatgactgttaggcgtgacttggatgaattagataaagcaggactgttaatacgcatccatggtggtgcacaaaaagtaaatgcatcaccaactccacaaaattatgaaaaatcaaacactgaaaaatacgatattcaaacaaatgaaaaattagaaattgcccaatttgcaaaacaattcatcaatgatggtgaaacaatctttattgggcctggaacaaccttagagaaattagccacgcaattacttgattttaaaattagggtagtaaccaatagccttcctgttttcaatattctgaatcaaagttcaacacttgaccttatccttgtagggggagagtacagagaaattactggtgcttttgtcggttctgttactattaactctattaaatcacttaatttttcaaaagctttcgttagtagtaatggtgtttttgaaaagtctatcgctacttacgacgagggagaaggtgaaattcagcgcattgctcttaataattcctttgaaaaattccttttagttgatagccaaaaatttggtaaatatgatttttatactttttatcaattagacgatattgattttgtattaacagatcataatattgataatgttgttaaggagcaatacagtagcttcaccaaaattttaactaataacaattacatgtaataaaacaagtgagccactactagaaacctgttatacagcttttagtagtggctctttatttagtgattataactttagtcgttttataaaagtcaaaacaagaaaacttcctcaaacaaaaatatattaactctctttttaagcgtaaaacaatggttgttcaaaagaagaattagatatatcattaaaagcttcgcacgctagaaatcataactaaaaaacaaacaagtacggtgacttgtttgtttttagttgtcagctaagtttactcaactcttttattatttcacttctgttagtgttttaatatcaacaagcactttagagccatcttttttagtaacttgaacttgactaccattaatataattaaagctttcaaaacttacactatatttatttgataattggatgagttgcttttcaaaagattgtctatccataccatatttcttagcgttttgtgccattcctagttcatattcatctagctctgattcatcttcttgtttttctggttcttcttcgtctgaccctttattaacatcataaaaaccatagttgtgagttactttccctgaatcttcaggttcttcatctggagcataatttttggctttattgtctttatttgagcctttgttatgatcactgtcgtgtccccaacctttttcttttggtaattcattaggatgttccatgtagtatttaattgttgagaagagttgttgtaatgtatagccttctggtgctttccataaaccacccttgtcaaaccatgccataggaacattatgataatgatcatgatgaggaacaatcaattgatcatcttcaaatccaactgcatatgccatgtgagcagcaattttatcaagcggtacaattttttctggttttgcttgtttgaatacttctgcagcacttaagtttttgtcactagaatttgatgttgatttattatcagttggtgcaggacttggtttatctgctttattagagtccttttccttataaatttcagcatctttaccccatccttcaactttaggacgtttttctgggtgcatcatgtaatatttagccgtagctaaatagtcttctaaagaatatgtcttatctgaatcagctaaaagatctttttcttcatcaaaccattttaattccacataatggtaatgatctttatgaggaattacaaatgtaccattcttatagtctgtcgcttgtgcaattccaaataataaatcttcaggtttaacaattgcttttggttcaattgcctcatagatttcttgagctgttttacctgtttttggtttgtcttgatttgcttcagattttcctgaaagaaattcttgagctgcttttaattccgactctgataaatctttctttggtacccaatgctcatgtgtcatataatgtaaccatcagatgttgtgtatttaccagcttttttgcctcttcaatttcttgagcactgtagacaatctggctatttggtttgcctttacgttggtctttcggtgttactgcatggtgttcttcctctgtgtgaggttccttattaggttcatgagaaatatgctttggtttctctgtagaatcttttttccctaatgcatcaatatgatgtcctctatgctctgccaccatccttgttgcttctaactctaatggagacatatccttatagtgaataaagtggaaatgattaccgtgcggaatagaaacaccgattgctgtgaaagcattaacttgtgctgggtcataaaccaaaccatcactttctacgtgacgagcatataacggttgagcatataaacgtttcaacattttgtctaaagcagaatctttgttgattggtttggttgtaggtgcatggtgttttggtgccgtagcatgattaccagctggttttgaccagtgatttgcgtgagtgactcttggaatagaaataggggcattagcatgtcttcctgttgatacattaccgcttggtgcacttgcatgaatgtatgaacttgaatttgatggttttgagctattacctgatcggccagtcttgcggttccaatatgcctgtgcggctgataactctgatggagataaatcagctttcgggatataatggaaatgatcgccatgtggtactaaaaaggcatctcccatgtcatcaatgacatctgttggactaaaaacataaccatcatctgtagtatagcgaccgctagctttcgcttcacgtacgctggctgataaagcttgagtttttgcactactatgctttcctgattctcccttagaaccacccttagaccattcttcgcgttgcttttggatttgttcctttgtacgaacatttgttcgtttgctaccttctttaagatagaggtaatacttaccgttaactttgataatataaccatctttgacttcattaatgacatcagctttattaaagacatagctagggtctttcataatcaattcttcactaatgatggcatcatatggcactttcccattgtaataatggtaatggtctccatgagaagtcacataaccgtcgtcagtaattttaacaacgatttgttctgcagatatgccttcttctttactgatttggtcgggcgttttatttacagctgttgcttgtgctttgctatcagatttatctgttttcacataagaaacactattgtctgatttttgggcattatagctacctaattggtaagcacctacaccagtaccaaatagagctactgataaagcactaataataactgtttttttacgattcatcctgcgtcctttctttatataactacctattgatttaacgatttgacaagtaccttaagattagtttccaaattttctaagtaatctttattgtttttgggaactgcttctaaaggacttaaacttgcaattttaactcgagtagctgaagctactgcttgagctaatttaggtgagactccttcttcaacaaaaatagtcttaaccttatatgttttcacaaactcctgaatttcggctaattttttagcactaggttcttgctcggttgagacacctgcaatacctaactgagtcaatccgtatcgcttagctaagtatgagaatgctgtatgtgaagtcacaaagtatttagactttgcagctttaaattttggcttatacttctctgcaatagccattgccttgtcactaaattgatcagcatttttttgataaaccttagcgtttttaggatcctttttagctaattgtgtagcgatgagttgtgcttcctcagatacttttacagggtcattccaagtgtgagggtcatacaaggttgactcatctactcctttttctgcctctacatcttctaagccatgaactttatccaaagtcataccttttgaagcttcaattacagatactttagagtgatgcaaactaggttccaaacgtctcgcccaagcttctagtgtgtgcgaatgataaagaaatagatcagcatcataaatggcagcaacatcacttgatgagggttcaaaaccatgaatacctgactgtgatcgaatcattttaatatcattcaaatcaccagaaactgcttttgtaatggaatatactggataaaagctagtcactactgacaagccatttttttgctggctttgtttagtacaagcacataagcaaattagggtaactactccgagaacaaaaataaggcttttccgtatccttttcattaaacctcctttaaaataaaaaatacttaaccagttaatattttagagtattcttattttagtgtcaacgaaaaaccataaatctaatatttttctatttttaatattgttaagtgcacttaatttcatatcaacaacctttattcatgcctttccaagctacagtaaatcttttcataaacatgaatgggttaaggagtataattagaaccacaataaaaagagccaagcattctgcccaactctttggttttttatttatttttagtatctaaaacgatagttactggtccatcattaatcagactgacttgcatatcagctccaaattgacctgtttctaccgaaacatgatttgctaattcttgattaaagatatcataaaactgattcgctttaacaggatcagctgccccagtaaaagctggacgatttccttttttggtatctgcaaagagtgtaaattgtgagatagataagacgcttcctttaatgtcttgaattgaaaggttcattttcccctcatcatcagaaaaaatacgcatgctagtaattttacgaactgcataagcaatatcttctgttgtatcttctggagcaatcccaactagaagtactaaacccttctcaatagatccgactacatcatcttcaatagaaacacttgcttgattaacacgttgaataatgattttcattttgctctcctaaccattcgtacgtttaacagaataaacatctgggataattttgattttatcaaccacagttgtcaattgtgctaaatttgaaattccaaagctaacatgaatattagcaaatttcatatcttttgttggttgtgcatttactgtcgatactagctttgttgcatttgataaggtttgaagaacatcattaaggaggccactacgattcaaaccataaatatcgatttcagccatgtactcttttttagatccatcatcatcccactcaacatcaatcaaacgttgttcgtagttctcctgactctttaaattttgacaatctgaacgatggatagccacgcctctacctttagttatatagccttcaatgagatctccaggaacgggattacaacattttgcaatacgcattaataaacctgaagctccttgaatgataacaccattttcactcttaactttgagaacatcacgcttatcggttttgatttcaccaccgttaataagttcgtctgcttccgctttagccttagcacgttcctcctcacggcgttctttttccgtcagtttattaaaaatactaatcggactcaaatcaccaaaacctacggctgcatacaaagcttcctcacttttaacactgacacgtggaaggatttcttcaatatgtttcttatctaaatatttgttaggcacataaccttgttcttggaaataatcaaccagtaattctctacctttattaatagaagtttctttatcttggtttttgaagaactgacgaattttattgcgagctttattggtcttaacaatcttaatccagtcacgacttggtccaaatgaattagggtttgtgataatctcaacaacatctcctgtttttaacttagcagtcaatggaaccatacgtccatttactttagcgccagtagctttttctccaacttgcgtgtgaatagcataagcaaaatcaattggtccagattcccttggcaattcctgaacagcaccatttggggtaaaaacatagatgcgttctgtaaagatatcttccttaacagagtcaacaaaatccttggcgtcttttgattcatcttgaagctcaactaattcttgaatccatcccataccaaccgattgctctgcttgattaaccttactggtgattccttttttataggcccaatgggctgcaacaccaaactcggcaacttgatgcatttctttagttcgaatctgaatttcaattggccctttaggtccataaaccgtcgtgtgaatagattgataaccattggcctttggtgccgcaatataatctttaaaccttcctggcataggacgccataactcatggatataccccaccatggcataaacatcactagcagtttccatgatacagcgtatcgcaattaaatcataaatctgatcaaagcgtttctttttatcacgcatttttctgtaaatagaataaatgtgttttggtctaccataaatatcaccatataaaccctgttcctcagtataggatctgattttatcgacaattatatcaaccaactcttcgcgttcacgacgtttttcactcatcatatgagaaatcttataaaattccgtctcattcaagtaacgaaaagataaatcttctaattcccacttgatacgactaatccccaaacgatgcgctaaaggagcgtatatttccatagtctcacgtgaaatacgctcttgtttatcttttctgaggtgtttaagggttctcatattatgtaagcggtcagcgagcttaaccaaaataacacggatatccttagacatagccattaacattttacggtgattttctgctaactgttcttcatgagatttgtactccactttacccaattttgttacgccgtcaataatatcgcgaacatccttgccaaaatcagtttcaatctcatcaagggtaatttccgtatcttctacaacatcatgtaaaaaaccacaagctaccgtaacggcatcaaggtgtaaatctgcaagaatacctgctacttgaattggatgaataatgtagggctcgcccgactttcttgcttgataataatgagctgcggttgcgtaatttaaggcaaattttacaaaagcaacatccgtctcactcatgtactgggatgtgattgcaacaacctcttctcctgttaaattaatttctttgaccatagttatcctctttaatcatagtgatagattgtacctattttatcactttttaacctaaaaataaaagaagttagaggctcaaaaagaattaaataccaagtaaatgtgtctaactaagttatcctttataaataaacgattgtttttggtgtaatcactaaaaataattcgtaaatgagattgattaaacgttttcaataagctataatagtttttagattaggataatatacatgtaatgttttaatggaggagatttatgtcaaaacattatttttcaaaaagcgtattcgctttaactgtcttaacagctacagcaacaagtggtttagctgttcaagcagaagacattgttacaacaccaagttcaacctctacaaaggttgaatcaactacccccactagcacaattgcagaggaaaagtcaaacgttacttctactccaactgcaataactgatgcttcaacagccacaagcacaaataccactaccaataaccaaaatccacagcctgttgccacagaagccacaactagtgatctcaaacctattgaaggtgaaaaagttgaccttcgcatcatgtcaaccacagacctacacaccaatttagttaactatgattattatcaagataaagaatctcaaaaaatagggttagcaaaaactgctgtccttattgaagaagcaaaaaaagaaaatcctaataccgtcttagttgataacggagatgtcattcaagggacacctttaggaacttataaagcaatcgttaaacctgtcgcagaaaatgaagaacatcctatgtaccaagccatgaatgctcttggttatgatgcatcaacactaggtaatcatgagtttaattacggtttagattacctcaaaaaaatcattgctacagccaaccttccaatcctcaacgcaaatgttttggatttcaaaacacatcaaccagtttttaaaacttatgacatcattactaaaaccttcaaagattcaacaggaagagctgttgcactaaatattgggattacaggaattgtacctcctcaaatcttaaactgggacaaggctaacctagagggaaaggttattgtcaaagattcagttaaagcaatcgaagaaatcgttcctactatgcgtgctaaaggagcagatgtcattctcgttttatcacactctggcattggagatgatcgatatgaagaaggtgaagaaaacgttggctatcaaattgccagcatcaagggagtggatgccgttgttacgggacactcacacgctgaatttccatcaggtaacggtactggcttctatgaaaaatacactggagttgatggtatcaatggaaaaataaatggaacacctgttacaatggcaggcaagtacggggatcatcttggtattattgatttaggacttagttatactaatggaaaatggcaagtctccgaaagtagtgctaaaatccgtaaaattgatatgaactcaacaactgctgacgagcgtatcattgcattggctaaggaagcacacgatggcactatcaactatgttcgccaacaagtaggtacaacaactgcgccaattacaagttactttgcactagttaaagatgacccttcagttcaaattgttaacaacgctcaacgttggtacgttgcaaatgaattgaaaggaacacctgaggcaaatttaccacttctatctgctgcagcaccatttaaagctggaacacgcggcgatgctaccgcatatactgatattccagctggacctgttgcaattaaaaacgtagctgatctttacctttatgataatgttactgcacttttaaaagtgaccggagcagacttacgtgaatggttagaaatgtccgctggtcaatttaaccaaattgaccctaacaataaagcaccacaaaatattatcaataccgaatatcgtacctataattttgacgttattgacggcttgacttataaatttgatattacacaacctaataaatacaataaagatggaaaagttgttaatagtcaagctagtcgagtacgcgatttaatgtacaatggtaagcctgttgcagacaaacaagagtttatgattgtgaccaataactaccgtgctagtggtaccttccctggggctaaaaatgccacaatgaaccgtttgctgaacttagaaaatcgccaaactattatcaactatattatttcagagaaaaccatcaatcctacagctgataataactggggcttcacagagtctattaaagaccttgatttacgattccaaacagccgataaagctaaaaatcttgttactaatagcaaggatattcagtatatcgctagttctaccaaagatgaaggatttggtgattatcgatttgtctatactgaacaagaaaaagtagaccttactgagccatcacatcaagaaaagttaagccaaatagaaaaacaaaaaattcaccacatggttgcaactgcttatacaaaagcaaaagcttctccaaatattacaggcactgtctatacacaacagaaagaaaaaacattacctaaaactggacaagaaaaacaatcttatctggctttctttggtgtcgcaatacttggactcgtgggaagtttacttaaaaagaaacaaatatagtcatcactaaaaactgaggccaatcaacctcagtttttagtctcaacaatagattttctctctaaatagtcagatattgagataccactctagcttgtttatctgacatgattttgctaaactgataacaagaaatttagatttaaggagtactaaatgcctaaattaaccctagtctatatcagtcttagcggcaatactcaaagctttgtcaaacgtcttagtgaacaactgtcaacttggcataactgtcaggtttcgactattaatatcaaggaacaaaatcatcaaacctttcctgttgaccaacctttcgtagcactattacccacttaccttgagggaggaaatggcattgacaatggcgatcaagaaattcttaccattccacttggtgattttatagctgcacacaataatgtcaaaaattgtatcggaattgttggctctggaaatagaaattttaacaatcagtactgtttaactgcaaaacaatactctgaacggtttggatttcctatgttaggagactttgaattgcgaggaacttctagcgacgttgaacgtatcgcaaatattatcgttgaaacattatcgaactttaaagcctaaaggaaatagtatggaaacaacattaaactacattaaaaccctgacatcaatcccttcaccaacagggtttacccaaacaatcatgacctatatcatcaaagaattggaagcgtttggctactcaccaattcgcacaaacaagggaggcgtcatggtttctctaaaaggaaaaaatgatactaaacatcgcatgataactgctcaccttgatacacttggtgctatggttagggccatcaaaccagatggtcggttaaaaattgaccttattggtggatatacatacaatgccattgaaggagaaaactgtactatacacctctcaaaaaatggtaaagaaatttctggaactgctcttattcatcaaactagtgtccatgtttacaaagacgctggaactgctgaacgtaatcaaacaaatatggaaattcgtttagatgagaaagtaacaactgctgacgaaacacgtgctttaggcatccaggtcggtgatttcatttcatttgatccgcgtacaatcataacagacagcggctttattaaatcacgttacctagatgacaaggtatccgctggtatcctaatggaacttctttctgtttacaagaaagaagacattcaacttccttatactactcatttctactttagtgcctttgaagagctaggacatggagcaaattcaagcatcccaaatgaaactgtagaatatctagcagttgatatgggagctatgggagacgatcaagaaactgacgaatatactgtctctatctgtgttaaagatgcttctggtccttatcattatgaattacgtcaacatcttgtttctctagctgaaaacaataatattccttataaacttgatatttatccttattatggtagtgacgcctccgctgccatgcgtgctggtgcggaagttaaacacgcgctacttggtgcaggtattgaatctagtcattcttatgaacgtacccatatcgattctattcaagcaactgaactcttagtggatgcctatctcaaaagcaatatggtggactaatggtagccacgctcattattatcaggggaaattcagctagcggaaagtctacaatagctaagcaacttcaagccgaattaggggaaaatacccttctcttatctcaggattaccttcgtagagagatgttaggaactaaggatggtgaaaatactactaccattccccttttgatcaatttactaaattatggttaccataactgttcctacatcatccttgaaggcatacttcgttctgattggtatacgcctgtttggaaacatattttaaaacataaccccaacaatacttatgcttattactatgatttaagctttcaagaaactgttaaaagacattcaactcgacttaaatctttagaatttggagaagattctcttgcaagatggtggcttgagaaagatttcttaaaagagatacctgaaaaaatattaacaaaagctatgagtttagaggatgtcaaaaaacttataatgaccgacgttttaccttaacattattgtacgcactataaacaataatgacttcttatcattggagtatattgcccatggatacagtgattgacctcttatttattatcgttcccattatagccggatttctggcatgtattagtctttatcgttattggaaaaaagatttcgaaagcgacgaagacgacgattaaactcctcggaatcaatgattccaaggagtttttctatattctcatttaatcagcatttctacgaatacgattataggttttaaggatttggcccttatgcttagtgacatagcgataatcttctttaagagtagcaatatcctttaaagctttcatgccattactcgtttgggcatctttacgaataggtcggttactcgttgactgcccaaaggcattttgaacatctaaagaaagcataaaattaataaataactttgcttctttcatagaaggagcattctttataattgcaaccgaagatgggacaaaaactgtcccttctgtcggatatacaatagaaacattggcaccacttttttgcaaattgacactagggtcttcgtaagtcagccccacaatcatttttccttctgcaactgattgataaacttctgaagagctagaagatttgatagcattaatattatgttgtagctttttaacatagttccacgcttttggattggtgtaaccacccttggccaagagtatattagtgagttgtgagaaagcactagaggaagtattcggatctgcaaaggcaattttaccttttaaggaaggctgtaataaatcttcataactcttgatggtaagtcccttagctaattcgttatttacaatcaagacactcccatttatagtataaggtgtcgccgtatcacttggatggatatagtctggaataacagtatgaacattctttgatacgtaagactcaaacaatgccttatgactttcaaattgcgtataatttcctccaaagaaaatatccgccttcaactgcttaccctccttacttaatctatctattagttgccctgtcccaccttgaataagcttaacttttataccgtatttttcctcaaaagctggaatcgttcctgttaaaatggcttgactatttggacttagaataactaattcttttggtggaagtagtttagaaggctggctaatactgtatgtaaaaacacttataaaaataatggaaacaaccagtagtatataaataagccttttcgactgtttttctttcatctttcacctacctaatccatttgtttaaaaatatgttcttccttaaacgcttttactgtctgacccaagtactttttaaaaaccctatcaaaataacgataatcataaataccaacagcttctgcaatttggtaaaccattaggtctggttctctaaacatcaactgaatggcttgattaatacgatattgatttatataatcactcaaagttatatgaaggtgctttttagtgactgtgtaaagataactttcactgtaacctaaatcgtgagctaactggctaatcacaattttcccatgaaaatggctatgaatccatgctagcatatctttaataacttcaggaacttggtcattagcttgtggtagaggtaaatacaattctgtatgctcttgtaggtgcttctccttatgttcctcaattctagccataattgtttttaaacaatcaatcaaagcttgcttttctagtggttttgttaaaaattcaagaacgccatagtgaatagctgattgcgcatttggaaaatcagcatagccagataaaataattttggcataagattgtcctttggttgcctcaaacatatcgaatgctgtcataattggcatattaatatcacttaaaacaatgtctggctgctcttcctgaattaattgagctccttctttaccatcttttgcttcaccaaccactaaaatattcaatgattgataatcaatagcatagcgtaaccacttacgaataaggtgctcatcctcaacgataagtaatctatacataactcactcctttactatatagctaactcgaaaagcatcatctgtcttcgtaaactctaacaatactgttgaaaattgatattgtaatcgtctataagaattaataagcccatgatgcgagtgagttgatcttaacattgtacgtatggcttgttgcctagccaaactaatacctgatccattatttgaaacagtaaaccaaattccatcactatcttgccaaatatctatgtttattgctacatcatgacgttcttttaagccatatttaatagcattctcaattagcggtaacaagaaaagttttggtacacgcatgtgttcaagttcaggagatactgaaatagtgtaagttaattcttcaaatctcacttgattaatcaaaaggtaggattcaatgattgctaaatcatccttaagcacagctgcttctgtgctaccactaaggctatagcgcaataattttgttagttgtataacgattctttctgttaattgtgaatcatagtgactggttattaaaattgtctcaagggtattataaaggaagtgaggattaaactgagcttctaacatcctcttttcaaacaacaacttttgtgtttccaaatcaagagttttctcatgtaaatcttttaaccgtgaaaccatctgattgatttgcacagatagatattgaaattcatcttgactatcaagctcaatactagatttttcttggcgggaaatggcatccatatctagcaccatttgatttatggcgctagaattttttactgcgatgcgatcggctagaactctagatttttgtcgtaaaatcacaaaaataataactgatgatactagagaaaaaaggacgaccagagttactggtatcaggggacgatacatgtaaagtaggatattgtcttgcagagctactttcctaacaacaaaagctcgatgatcgtgaaaactaaaatatctagttaagaattgactatctaccttatctaaactagaggagataaaatcacgattagtaaaagtaaagctattatttagctgatcggcaataatcaagtctgagttaatagccttcgttggaagtaaaaagtctttcccattcatcaataaaaaggcataacctgaaacttttttattaactataattggcttaatgagtgcaaggtaatgccctccctcactatccacaataatttttagtagcctttgatttattttagccttatctaaaacttcactaatgtaaatagacttactaaaaaaattacctaaatgtgaattactagcaaacaaaagttcttgattaggtgagaatactaaaagttctgtttgactttgtaaatgattccttaaatgataatattgcttactcaaatcagcacttcctaagtgtcctgagacaaatggtttcaaactatttttacctaagtcatctaataaggtatcatgtttttgaatcaattgcttataactataggaaactgaattaacatctttataaagacctatctgttgaggcgctaaagaaaaaaggacgaaaagtgcaatcaataacaaggataaaattaaagactggcgggaaaaatgtttagagatatcatcttgtagtcgtttcttaaagcgttcttccattctatatcctctcatttccatctccttttattatagcaaatagctatccaataaagatagtcaactcctttcatacaataactttcaaaagaaaaaaagataagctaaacaagtatcgtcttgttccacttacctttaatgctaggagattattagcaaatacctaagagaccaagtacaatacctaacaccataataccaaacatgatccagttgatattgacttttttacgtagaagccagaaggctaatatcgttaccaacagtggcactacgccaacaaataattggtcaaggtaactttgtatggaagctgcttccttagctcctttagctgctaccgttaagattgtcttgaatttaacatttgaagcagtcattgagcctaccatcattaaaccaagcatacttgaagtcttagtaacaattttaataccacctgattcatacaattttttgataaaccctgcacctacagagtaacctccatagagactataataatgaatcagaaaagctggaatgttatacaagagtagaaagacaacagctcccatggctgagcctgtacttgctaaggagataccgatacctgccgcaataacccttagaattccccaaaagaatgaatcaccaacaccagatataggtcccatcaaagaagccttaactgcggtgatagcactagcgtcaaaatcaggatcttcactgtttttcttttccatagatgcaacaagacccataataaaattattaatgtgcatggtggcattaaaccatgttgtatgacggaccagtgcctctgctttatccttatcagtcttataaaaacgattgatgactggtagtaaagtataaataactcctactgcgtggtattgtgttgccccagtacgactggcattcatcgtccatgagcgccagaagactgagcgaagcattttacggtcttctttagtcaaattatcctgtgatttcatgcgaagaagtcctcctcttctgattctttagagtcaaaggttgtctgtttactgatcgcacctctagtaattgcgtctaattctatatcacgttgtgaactaatgacgcaaataactgctcctagggcagcaactgcaaccgctggtaattttaaataagctgttaaaacaaaaccaagcaagtaaaaaacagctaatttatttgtccataataatttcatcagcatggcaaaaccaacagctggaaggaggcctcccgccgcactcaaaccattcatcaggttttgaggaatatgatggacaaaactattaacaggcccactacctactaaaataccaatgaaagaaatagaagcgataatgagatagtaaataatccatgtaccatagtgaagcatcacaagtttaccttgatggtttgcggctgcagctttatccaccatcggtgcaaagatattcatgaagacgtttttcaaaaacataacaacaaatgctgccaacattccaatcggaacagctagagtcattgctgctttttgatcaatgtttgaaataatggtaaaagttgttgccatcgctgttgctgttactggctctgcggcaataacacccccaatattaacgtttcccaaaaatagcgcttctagggaggctcccattaggataccaaccttaatatcacctagtagcattcctgttacaagaccaactacaagtggtctctccatcatactttgacctgttaagtaatttcccccaaaacaaatcaatacagctaaagctgccatcgtcgctggcattatcatatgtcatacctcactttatttgactaactgactcaagttaaccttagtatttgaaggcaatacttggttaaagacgtctaaatctggtaagctggctaattcttttgcggcttccaactcttctgtatttaataagagacttgatgttagtttgacttttgtagctggatcagacttatcaaagcgtcctacattagcgacgtttactgcttctaaatcggttatatttttagcaattgtacaggcatctttaacagaattgacaatcacaaaaatgcgcttgtcagttgcacgtggatctttaaatagagctattgattcttcaactgaacggattaataatttcatgccattaggcacagccattttaagagtcatctgtgtgatttcattttttgcagcttcatcattagccaccactaaaagtggtgcatttaattctttagtccatacaactgccacttgcccgtgaatcaaacggtcgtcaacacgaatttgagtaatcatttttttcctcctaattattaatcgaaaaagtcatcttctgaacccgctttaaagctaagatctaccagctgcacttgagattcattgataacggttacaatttcttctttagttaattcctcttcaggtttcaaaaatagtaatgacaacaaggtcgctaaattgctgttcgttattaaaaaaatattatttttcccactattcattacagcagtcgccattttctgattaacgctgccacctaacaaatctgtaaaaataagcccctgttcatctggtgcaatctcatcaataaattctacaatagacttagtatagtcactatcatcaatgtaagcatctattgtctgaatctcttgtcccttgcctgtcagaatatcaatagaactctgcaacccactcgcaagttttccgtgactgccgattaggaatttccgcttcatctttctcctcctatttattacattaccctaaattagttctgaaagttttatcaatactttgaataagataacctttactatcattctaacaaatgaaagcggtttaaaaatggactattctactctatatgtggactattctacataattaatatttaaaaacagaacaataaaaaggtcatgtatcctaatagtttacacaacctttacatcactataactttaaactttctcttatatgcatcactatttcgaaagagataatggaataattttttgatagggtatcttattaacaacctttattatgagtagagcacaagcatgtgttaatgccaaggtcaccacaaaaatcacttttccttgatggtgtgcaactaaggaagttgattttaaacagtaagacactatgccaataaaaagagggggaaggaagaaataatagacactcaactgttttaaaggacttaaacgatattccttaaacagtgatgtacgtatactccagttaaataagaatactgcacataaaggagctaataagaagaaatttttatccaacccttgattaaaataaataagaacattctctaaagctagaagtaaaaggaagagaatatacttaagaccacgcgatttggtaaataggtcagtattaaaataatcatagagtaaatatcctgctagaagataaactggagtgtaaaataatccgtttcgtgttgtctgaaaaattgacatataagtggacatcaggggataaaattttgttgactgtataaagacagaataggtctctactgctccaatacaatagagtacaacaactgtgataaatgtccccctagttcctacatacttcaataatccttgaataatgacccaacctagaataacagcagggatgtaccaaagggtatgtgacatacctaaatacaaaaatgccacaataaaccccggcaacaaatagatcttcgctatatttagagattcaaaaaagaaataaccataaggcaaataaatgatagtccacatgctatactttttaatcagtttacgaaagtaggagtgattacacaaaccttgctgtatacgacctctcaaaaagaaagcagtacaaatcaaaaaataaggaacagccatccgacctaggaaacttttaaaggtaaaatgaatgacatcctgactaaataacctcccactatgaactaaaatgaccagtatggaaaaaaggtattgtagcaaactaatcattgatgtattatgctgcttattatccacgcactgacttctcttcatccttaacattactttctataagttatcattactatgataccaatctcttcagaagaatatctcaattatcccaaaaagtcattgaaacgccttaaatggtatctgataattattgttaataccttatcaaccatattaggaaataaaaaagctgatttcgcaaaagaaaatcagcttagaataatttcttgttcagataaccagtgggaactataaacttcttcgtcgcattaaacgataggtataggctatcaataacactgcaattaacatacgtagactaatcagacagatttcattagcagaaaaactatcaaagaaaaagccatgactaccattacgtgataattttaaaagtaaagctgaagtgtctgtcgttgatactgagaaaatagttaataacttgtttatcacacctttattaaacatagccattaaaaagctaggagcaaaaaaggcaagcgttgaaacagcaaaagatgttaatggcgaatttgtgatacttgatataaagaaattaagactggctataaaaaggagtccaacaaattgtaagacaataatatgaacaaaagcagttgatattgtcataggtacaggaaatcccataatattagccaaaggtgatgtccagtataaattcagttgaacgcttgtctcccaaccactaaaaccaaaataatctgcaaataccgtcagaatgagggcatatgctaggataaatgtggaaataccgatggtcattgtactagctaacttagcccaggtcaactgaccacgtccataccgagtcgtcagtagtataggattaatcttcttagccctatctcctgaaaaaagaggagctgataagaatagagtaaataagacaattaaaatataagtactattacttacttcgaaaagttgattccaaggagcaaagttacctagctttagttgttttagtggtagcgcagaacccaactgtttttgatctttaatatttattttattaaaatcaattgttttatcatctttcaattggttatagtaaattaaaaaatcacgatcaaaagtgtctgccacataataactaaaaacatcaaatataggggggcgtcctgctggcggattaacatagtttttaataatatttgttactcgttcttcagataaatcccctgaatatttttcagctattctacgattaatggcaaccgcttctcgaccatgtattttatctgcagaatagccactaatttgcccaacaaaaaaatgctggtaaaatagaccaaaaatagcaagaaggaagataataaaagccccaaatgctgccttacgttgtagaagtttttttaattcaaaaggaaaaattgatatcatcttacttactcccctctaaaatgatagatgtagaaatcttctagagtcggaacaaccaactgtgccgaatcactcggacaaatatcactcactacacgaaatacccgactatctgaaaagactttttcattaacaatagcaatattgggtatctgagataaacctggttcagtcgttatttcccacacttttccctcaatagttttcaacagctgtgcggtgttgccatgttcgataaatttaccattttttaatactataatttctttggcaacagcttccacatccgacacaatatgcgttgataaaatgataattttattggtggataactgactcaaaatatggcgaaatttaacccgttccttgggatcaagtccaacagttggttcatccagaatgagtatttcaggatcattgataagtgcttgagcaatgcctaaacgttgcttcataccaccggagtatgatgaaatcttctttttacctacatcgcctaaaccaacaagctctagtaatctaggaatttcttgtttagctttctttttatcaacaccttttaaggtagcgatataatttaagaaagcaatgccagtaaattgatcataatagcgaaaatgttgcggtaaaaaaccaatgtgacgataaaattcttccgactgctcctgtccattccaataaatattcccactatctgctaatgtaaagtggctcatcaaatttaataaggttgttttgccagtaccatttgctcctaagagtccatacaaaccaggagtaaactggtaggaaatctggttaagtactatttttttcccgtagcttttagtgatattatctagctgtaataacatagtattgtctcctttcaataattaagacagttgaaaaatcaattactaaaatatagcgactgagctaaaggttaaaaatgagctttctcacttactctctaaatgattgtaaagtaatatagctaaaagattatttctaagccctgacggaaagtatgttgttcactatttgtactaatagatgcattgggataacggtcaataactttcatgacattataaaggcctaaccctctatcttctcccttgctacttgctccataaccaaacaaacgtgaagcatctattctttcctcgactatcgaattttctatgataaaaatttgcttatggtttaatgtaaaataagacatggctatcttaggttcatctgtctctaaagaaacttcaatatggtggctataatctatcatattagccaattagagttttctttgaacaaccaacctctcctgtaaagaagttttgaagtaacggtctaaaatagaactcatctttttctatccttttgatatttatccactatagatactatatctctcactttattgcgtgaaaccagacaagtcgttccattttggaagtaaactaatctatctatcctatccactttaaaaatatttaagggatttactaaaaaagagcgatgacattgaaagagcctaggttcttgttttaaaatatcccccaaagtggctgtgaattccattctatctttttcagtataaaggacaactctatgtgatcttgaggatgtttctatataaagaagatcgttaaaaggtaattgtacctggctgtaacgcgacttaaagtagaatgaattttccactaagggcttattgcaaatgccatctacgtacaacaatacttcctcaatcctttggctaaactcttcctgtgaaagtcctttatcgatatagtctaaagctgatacctgataacgaaaggttaaaggcattaattctgaatgagttgtaacaaaaacaatctgagcatatggatcaacttgtctaatttgttttgctacctctaagcccatctgctcatcattttttatttcaatatctaagaaaaataaattatgtaaacctatttcataaattgattccaataattgaactggtttagcaaacgtttctactgttttgaaatgcagattgtactgtactctaatctctttaatgattttttcaaaatgggcttgttgaacaaaatcatcctcaagtataaaaatattcaccttatatcctctatcttattacttgaatattaatagtcacaatagagccactacgatattcttctcataggtatcgtttatgagttatcccgtcttaatatgtgacgtccatgaggctaattttaaaagcataataaatatatgctaattttaacatatatataactatttgaacacctaattaagtagttaagtattaaaaataaattatttctattaaaatacccttagatacagactttatctgaacctaagggtatcttttattataagatattagaaatccatggtaatttccaagccgtaatgatcactaacgacaggtgcttcaccaccttcaaaaactacttgacttgaactgattgaaaggtcttcgctagtaaaaatatggtcaactttaagagcctttttattcccttcccaaccatcaatatcagccataatagtatggtccccaaatacatgattggctatttggtggctatcctttaatgctaatggactattaagaacaagttcataaccctgatttccagtaggattattaaagtcacccatgagtaaaagtggagtttctacctcaagtagggtagtttctagtcgtttccactcctccgcaaatcctttctcaaaccatgagaaatggaggctaactactgtaacgactttgtcattcagagtggtctcagctaccagagcacgacgagtatgataatcagtctcatcgtctacagctgaaactaaaatatcctctggctttaatggtttcagagaaagtatcgctaccccttcatggtacttactataaccaatatgattataagcccatgtccaatgatagtgtagaccttgaagatttaggtaatgcactaattgcaaggcaaagttatcttgatgaagagctggtgtaccttcaatcggatgataatttggactactcttagcaagaggggaagatatgctctggttcacctcttgtaggcagatgatatcatatttttcacggaagatatgctctgctaaatcaaataatttctttagagcatttacttccatccatgaatgagtatttaacgttaagcattttgccatagagtatcctttcatcagaaagaagctgagacttgcccatctcctatcgtttgttacagttcgacttttgccacaactgttttagctatttgtggacctgatttttcaagtttaacagtttttatatctgaaacatttgtaaagacgataatcacacttgtctctttaccagctgctttgatagcttccaaatctgctactacagcaagatcgcctgctaccactttttgaccactagaaattttaacctcaaatggttgaccatcaagagctactgtatctagaccgatatgtactaaaacttctaggccactttctgttaataaaccaaaagcatgttttgttggaaagacactagtaactgtacctgaaactggaacataaatattgccatcagttggttccacagcaaagccatcacccatcattttttgagaaaagacagggtctttaacaacatccaatgcttctacttgaccattagccaccgaaacaatttcttctgttattcctttataagttgtaactggggctgctgctacaggttgacctgtttctaaatcaactattggaataactgtacctgaatctagcaaatcttgaatgtctgatttaaggacatctgctttaggtccgtaaatagcttgaacgccattaccttttaacaccaatcccattgcaccagcttttttccaagctgcttcagaacccacgctatttccatctttaactgtgacacgaagacgagtcatacatgcatctacatcttcaatgttatcacgaccaccaagtaaattaataacttgtacaacttgagaatttgcatcagcagaaccagaagctgttgaaggagcattatcaacctcttcgttatcataattaccattacgtcctgctgttgctaaattgaattttttaatcataaagtttgcaataaagtacatcaatactgcaaaaagaagtgtcacccaaacaaagttgaaaatatcaccaccaaggcccgcttttatgcccataggaacacgtgttaaaaattctatattaccaaatgaatgaacgcggaggttaacaatatctgccatagcaaacgcacatccttgaacgacagcatatacaaggtagagtggcattgctgcaaacatgaacatgtactcaattggctcagtaacacctgtcaagaaagtagccgctgctgctgaaataaacattgacttgtatttcaattttttatctttatcaacgttacgatacatagcataagataatcccatcaaaatacctgaagcaccaatcatttgccccactttaaaacgtgctggagtgacacttgtcaataagtgatggtattgacttgaatttgagccttttaagttaattaaatcaccaacccatgctaaccacagtggatcttgtcccaacacctgtgctcctttagttgcacctgtaaggacagtgtatgtgccacctagttgcgtgtagttcattggaatagttaacatatggtgtaaaccaaatgggagcaataaacgctctaacgtaccgtagacaaatggtgctaatattggagcactgtcttgtgaacttgcaatccatttaccaaagccattgatacctgattgaacaaccggccaaaatactgataaaattaatgcaacaatgactgaacgataaataacaacaaatggaacaaaacgttttccattgaaaaaagttaaagcatctggtaatttacgatagttataatatttattaaaggcagttgcaccaacgaaacctgaaataataccgacaaatacacccatattaagagcaggttgcccaagaacgttaacaaagtaatctgaaactctgatggttgcaccaaataccgtttgaacagttgctttactgtctgctaacatatctgttttaacaccaaaaaagttccctgtaataaggttaataagaataaaggataagccagccgcaaaagcaccaccggcacgttctttagcccagctaccaccaatagccaatgcaaataagatgtgtaagttaccaataactccccaaccaatttgagcaataacattagctatgcgccctaataaaacatttgatggatccaatagactaatggagttaccaatactaaccatcaatcctgctgctggcataacagcaataacaaccatcaaagccttcccaaacttctgccaaaattcaaaactaaagagctgtttgacattatttttcatcttcaatctccttttatgcacttaatagtgcaagcgtttgcgttattatggttttattatagcacttatttgttttttgtaaacccttacttatatattttttctgaattactaaaaaagtctagataatatcatctagacttttatttgtgagtttttattgtttgtgaagtaaaacggtcattgttgttccctgccccaaatggctgtccacttttatactaccattgtgaaaatctaaagcactctttacaatagacaaacctaaaccagtccccccaactatttttgagcgacttttatcgacgcgatagaaacgttcgaaaatacgttttttgtccttctctgcaatgcctagtcccgtatcactaacttctaaggtaattgtatcaggtgaatttttcaaagtcacatttacttgacctttctcatggttataggtgatagcattgtcacacaagttgtacaccaaggaattcaataaaactggattccctcgcaaaatagcttcttctccattaaaattgatttgtatgtgcttcttatctgctttagcttgtaaaccttctaaaactttttgtgttaagtcatacagatttactgtctcttgcggtaatttttcttgttcatcaaggtgagaaaggttgataatatcctcaaccaatttaactaatcgttcagattctttatgaattttagctgcaaattgtgggacttcttcgtttggaaccatttgattagctaacagttctgagtaaccagaaataacatgaagcggggttttcaattcatgagagacattggcagtaaattcacgttgaagttgttccatttggagttgatcagtcacatcaaacagtagaacaaccaatcctgttactcggttgttatctgtagttggtcttaccaagacgcggtaatgattattttcaatgccaatattagcctctttctttttcccttttagtccttgatcgattaagtctttgagagttaaatctcggctaacttccatcataaagcgcccatgccaatcatcattaatttggaataactttaaagcttctgcgttgatactaacgattcttgcttgatcatctaaaagaatcattccttccttaattttagaaataatggtatcaaattctttttgacgcttttgtaataacagtttttgatgttgaatcttagcctgatggctatcaagacgccttaataatggtgttatctcctcgtaactatcatttgataaaggatgatctaagtcaatattgtttaaaggctctgatactttttttgctatatatcgtgcaattaatacagataaaataatagcaagtaagatgataattgctaagggacttatcataccaaggagaagataaaaaatagtttgttgcgcaactgataaacgaactatcgttccattatttaaacgttgcgcagcatagatagacttctcagtaagtgtcgctgaccacctcgtgctctcaccataaccactcttgatagcttctttaatttcttgacgattggcgtgatttttcatatgttttgcatctgattgggtatcataaagcacttgtcccttattatctacccaagtaatacgcacatttgaagttttaagattttcaaaataatctttaccttcaaaggaaattccttgtgacgccagtgccgtttgtgttctcaactgttctcgctgaatgtgattgaagtaattatagagaaatcccataatcatcaaaattgtaactaaaacaattcccaaactagcagataaagttgtacggaaaatttttttagtcatgtctttcctccaaacggtatccaactccccttactgtagcaatcaaatagccatcctcaccaagttttgttcgcagtgtcccaatgtgaacatccacagttctagtttctcctaaaaattgttctccccaaaccttatccagaagttcttgccttgtaaagactctattgggattacggaagaataatactaataactcaaattcctttagggttaagtggattttttccgttccccttttgacccaataattagtcggatcaatctctaaatttccaatgataatatgagcttttgaatctacttggcggctacgtctcaagactgcttttattcgtgaaatcatttccatcatcccaaaaggtttgacgagataatcatctgctccaagatctaaccctttaactttatcatactcactacctttagcagttgtcatgattactggtatcatttccgtttgatgttttctccttaaacgctctaaaatagtcaaaccatcatctcccggcaacataatatcaagcaaaatcaagtctggaactttctcctgaatagcttcccaaaaaagctctgaactcgaaaatccttgagctttaaaacctgccatttgcaaagtatagagcatcatttcgcgaatatcagcatcatcttcaacacaatatatcattacgcttctccatctaggttacctgttattgagaaaagcacccacttagcaatatttactgtatgatcaccaatacgctctaggtacttggcgatcattaaaacatctatgggatattcaccatcaacatcctgtaccgaaaaatataacactaactgtttctttattgtatcaaattcctggttaactgtcctatcttgttcaattacttgatgcgcttgttcttcattgtcataaataaaagcatctatactcttagtcagcatactaatgacattattagacatgctgttaagttgatccctttcagaacctgaaccttggataatatgacctaaactaacaatttccgcaatttcataagcttgagcaccaatacgtttcatatcataaaccatttttaatgcagaagaaatacggcgtaaatccttggcaactggttgctgacggagtaaaagttttaaacatctctcctcaatatcccgttccatttgttcaatcttgtgataagtttcagaaatatcgtcaaggtaaacgtcattactatttgttagagcacctaaggacttcccaatgatgtcctcacacaatgcccccataaaaataatttctttattaaggtcattaagttgacttgcaaatcgtgaacgaatcatccgaatctccctgtaatgtagttttctgtacgctcatcttgtggcaatgaaaagagttggctcgttttgttatattcaaccacttctcccatcagaaagaatgctgttttatcagaaatacgaacagcttgttgcatattatgtgtcactataacaatagtgtagttcttcttcagttggataaccaattcttcaatttttgctgttgaaataggatccaaggcacttgtgggttcatccataagtaaaacatcaggctcaatagcaagagcacgcgcaatacacaaacgttgctgctgtccgccagacatacccagagcagatttgtgaagacgatctttaacctcatcccatagagccgcctgtttaagggaacgttcaacgatatcatctaactctgctttggaatgaataccgtgcgttcttggaccaaaagcaacattatcataaatgctcattggaaacggattaggtttttgaaacaccattccaacctttttacgcaattggttaatatccaattgtctatagacatcctcgccttctaaagtaatatcccctgtgattttgcaatttttgaccaaatcattcatacggttaatacttttcaagagagtagactttccgcacccagaaggtccaataaaggctgtgatttctttttcttcaatgtctaaattaacatccttcagagcgtgaaattctccataatacaaatctaaattattaattactaatttactcactgttcgactcacttcctaatcgtttggctactagtccagatacaaaattgacaataataactaaaagcaataagatgaccgcagtcgcataagtttggtcaacatataagccctcacccgaaatagcatacatatgtactgctaaagtacgagatgaactaaataccgaatgtgctacttttgcaactgttccagctgtgaaaataagtgctgctgactcaccaatgatacgtcctaccgctaaaataataccagcaaaaataccagacatagcactaggtaatacgattttaaatatggttctcaatttaccagcaccaagcgcaaaggctccttctcgataagaatccggaacagatagtaaagcttcttcagttgtcctcataatcaaaggtaaaatcatgatgctcaaagtcagagaacccgatatcaaagataagcctaagtgtgtgtattttacaaaaaataatgcaccaaacaaaccataaataattgaaggtatccctgccaatgtctcggttgcaacacggataattttgagataaggattatcacgtctagcatattccgttagataaattgatccaccaataccaagtggaactgcaaataataaagttaaggcgatgataaagatagtgttaatgaaagctggtaatagtgaaacgttctgagtattataagtccatgcaaacaagccagtattcacatgaggaagccccttaactaaaatataaataacaacaaatgcaattgtagcaaaacttagaattgctcccaaatagacaatagcaaaaagaaagaaggaaaggggatctttttttaaagatgctaaatattgttttgacgttctttggttaatattttccatcttattcctctttctgtaatgctgaaaaactgatattaatcattaatataaagataaagagtaccacagctgtaccaattaaggcttgacgatgcaaaccagaagaatagcccatttccataacaatgttagtggttagagttctaacgcctgatgtcagcgattgaggcaagacagcttgattacccgctaccatgatgacagccattgtttcaccaatagcacgtccaattcccaaaacaaccgatgctaaaatgccacgtttagcagctggtaaaacagcaaagaagacacttcgttcatgagaggcaccaagggcaataccgccttcataatagctctctggaacagctcttaaagaagattctgaaatgctaacaattgttggtaaaatcataattcctagcaaaattgaagctgctaagactcccataccaaagccaccaatatattgccttatcatagggacaataacaacgagtccaaagaaaccataaacaactgaagggattcccgccattaaattgatagctgactttaaaggcttataaatattttctgggcagaaataagccataaaaacagcagtaaggatacctatcggtcctcctaaaagtaaagctcccgctgtaacatataaggaacctacaatcattggaaagatgccaaaaatattattactaggatgccagactttaccaaatataaaatttccccagccgattttcgtaatagctggaagaccactagagaagagaaagaggcaaattaaaatagctgatataacactgacgcaagccgtgatgaaaaacacagcttgcataagaccttcttttgtttgtttcattgtttactcttaccttactttgataagtcagaccaagacgttgtctttccagtaaaaatgtcttttacttgttttgttgatagatcattaactttatttttcttattaacaactactgcaataccatctgttgcaataacagtagctttgacccctttggatgactctgtcttatccaattcacgtgatgccatacctatatctgctgatccatcaattgcgcttgtaatcccagttgaagaatcactttgttgaatttcaacatctacttttgcatttactttatgataggcttctttaatcttttccataaccggcgttactgaacttgaacctgctataacaactttaccagatgacacttttgcttgatatgctttagcattgtcaagtggaatatagccatttttctcaacgactgcttgcccatctttgcttaagatataatcaataaaatcttttgttgcttctttttccttaccttcttttgttacaatattgaaaggacgagaaatcttatagcttcctgatttaatatcttttacagtcgcatttttgccatcaattttaagcactttaacgctactatttaatgaacctagtgaagaataaccaatagctgacgggtctttagagacagtggttagcataactgaagttgaattggtaacagttgctgcatcagaagtatggtctactttttcgccctttttattttttgactcgatcccaaataactctatgaaagctccacgagttccagacccttcctctctagaaacaatgttaattgtccctttagatgaagatgatgaatcatttgagcatcctgctaggatgccaattcccataagaccagataccgccaaaagagatagcattttgtgttttttcatgatgaactcctaaatattttttgatttgattttattatagttaagaaatatcaaatctctttgaggatttttgtaaaatcaatgtaaaattaaaaagagttggaaaattatccaaactccttttttctattatggtaattcagccagtaagtcggattgaaacagttgttacatcacataattggagtataactatcccattatagagttaacttacgaatgatgtcaatgattttttcagccacttcctcagcatttaaatgatttgtattaatatgaataacattggaaaatgtgtctaaataatgttttttagcaggcagcaggtgatgagtataccatttgaaaaaatgacgctgtctattaaaatcatttttttgacgttggtataggaccgtctcatctgcatctagaaaaataatataatcagcaaaacattcctttagcctatttacctctagtaacaaattagaaggtaaagtccaactataacccgccacctttggaaagtattgtgtataaaaagcaatttcctcagctccataatccattaacactatttcattatctctaacaagttcgtatctatctcgctcatgctgaataaatagttgttgaatttcacaataatcgtctaatttattgttatcaagctgatgtttattaatcttatcaactactggagaaatatcctcaaaactaatagcgattttggggtaaacattctcaatgattttcaaagctgtggttttccctacagccataccaccttgaatagcaataatcataataactccgctgagtaactaataacacttagagcatagagcggcgctgtttctgtgcgcatgatgcgtggccccaagcccaccttgatagctccaacctcttcaaaagctgcgatttcttttggagaaatgcccccttctggtccaaagatgaagaggagcttgtcacctgcttttacagtctgcaagttctgggctagcgctgacaattcaccctccttggcagactcttcataggcgataaaaatcttatcaaagcctgcaagctccgcttgaaaatcagccttcttctcaaataaacgaacctgaggaagacgattacgcttgctctgctccgctgcgcccagagcaatttttgccagcttatcttcttttttagctagtttcttgccgtcccacttgacgactgaccagtcagctgggaatccccagatagccgcagcacccaattctgttgccttttgcgtcacaaaatccaacttgtctcccttgggaaaacctgaggcaatggtcacttgaactggcatttcaacattgttgtctagctcttctagaatttggaagcgatgagcagagctgtccaccacctttgccagacgcttgatggcatcatcaaaaaccaagaccacttggtcatcttctgtcaatcgcatgacattgaacatgtgcttgatggtatccttgtcctcgatggtcacataggcacctgcttcgccatttacaaaatactgttgcattagccgccaatcactcctgaaatatcatctgtctttttgaaaacgcaggcattccactcaccttgaaccatgtgagtctcaaggaagaaaccagctttttcagcactctcacgcaccatgtcccacttctcagaaatgataccagacatgatgagatagccctcatccttgaccaaacggtaggcgtcgtctgtcagatggatcaaaatatccgccaaaatattggcaacaataacatctacctcttgctggacacctttgagcagatcaccagcagccacatgaatattttcagtgccagggttcatatcgatattttcctgagccacgcgcactgcaacatcatccaaatcataggcatagatgtccttggcacccaagagagagctagcaatagacaaaacgccagaaccagtccccacatcgataaccgtctcaccaccacgaagcacttgctccaaggcaaaaagactcatcttagtcgttgggtgagtcccagtcccaaaagccataccaggatccatcttgataatcttctcaccagccttagcctcgtagtccgtccatgacggcacgatggtcaaatcatgggtaatgcgagctggctcatagtacttcttccagttatcagcccagtcctcttcgaccaattcctgactgtcaaggttgacgctacccgtcgcaagaccaaagccttcaaaattagctaaacgatcagccaaatcagccttaaccgcctcaatatcaagcgtatcaggataataagcagtaatagcaatcatatcagactgctccacctcaggataaagctcaccgaaacgatcctcctgtccaaggtagtcagccgaatcgctaatggcaaccccctgactgccagtttcaatcaataaattcgagacagcttcctctgcctcacgattcacgtgaaccgttagttcattccatgtgttcatgtagtaactccttcattatttctacttaaatcaataaaatagttcaactgccatcgctgtgtcaccaaagctgttctatttaaatcgctacaccaaggagggtaaaatcgcatagccatctttccttgagagttagcagatgaaagaatacccttactcactgcaacctctttgggaatgatgaacaaacctttccacctaccatctttaatgacaataatcaaatcttccacttcatcttgttcataaaaaggaatatttttaccatttccatctttctgccaaaatactgtaaaataccccatcttgctagctgtcttatgagctaaacgacaccttttatagtttccatcgccttcaattcttatgaggataccttcatatttttcattccacttttcttctttaacttcaaaggaagaataccattccctaagtagctcaactatttctataactatccctcctttatcttcaaatcaatatgattaaccatacttttcaaaataatttattttttgcttgaccctgaccttaggttatcctttatactatgtaagtgagaggaggttattaccatgaaaacagttaaagaagtcagtatcttaagcggtgtaagtgtgcgcaccttgcatcactatgataaaatcggtttattcccacctaccgccctatccgaagcaggctatcgactttatgacgatgaagcattgattcgcctgcaagaaattttgctatttcgtgagttggaattccctctcaaagatatcaaatacctgcttgagcaagcaaaagaggaaaggcaagacttattagcccaacaaatcaaattgcttgaatggaaaagatcgcaccttgagcaggttatcacccatgcgaaacgattacaagaaaaaggagatgattatatgaatttcgatgtttataataaaacagaattagaacaattacaagctgaagcaaaagaaaagtggggacaaacagcagcctacaaagaatttgctcaaaaacatgcttcagatgactttgcacaaattagccaagaaatggcaaaaataatggtacaatttgggcaattaaagacacaaaatgtatctgatgaatctgttcaaatgtgtgtgaaacggctacaagactatatctctcagaatttttacacctgtaccaatgaaatccttgctggactaggacaaatgtatcaatcagatgaccggtttagtcaatcaattgacaaagctggtggagcaggaacaagtgaatttgtcagccaagctattgcttactattgccaataaactatcagaaaactagacaatcatctagttttctttttttattctatcttctttgtcatatagaccatatccattccttcttgctcaggttcggtatgggttgaatgataaccacatttttcataaaaactgaccattagtttttcttgcgcaatcgtacataaatcccactttgtaagcttaggataggttttctctaataaagccatcgctgctgagccgtagccctgcccttgatattggggaagaatagccgccgtaccaagccaagcacgcttctcctcgtctttgataaccaatctaagaaaaccaacaattgtctcatcaacaaggacaaaatgatagaaacaatctggtcgctccactagtttccatcgaatctgctcaacttcttccacatagggatcgtattgatcgtggtatttctcatagactgccttaaagctagctctctgaatggcaataatcttctctaaatcactagcttccgccttttgtaaagtaatcatcttccacctccaaataatctctcaacctctcctgcaactgaggaatgacctttttatggcttaaaaattcgtcaatggacatgagtttgtagtcttgtccttcatcgcctagaacaatgctatcgtactctttctgactgatatgtccaaccataaaaactgataatttatcaggcttcaacatacccctataagtcttgacccaatcaatatggtttcgagttaaggtcagacttaattcttcatcaacttcacgaaaaagacattccaaaggtgtttcattgtcctcacgaccaccgcctggtaagtcccaaaagcctgcatagggcaaatctggaaaatcatctcttaggctggtcaaaatctttccctcgcagaaaagagcgatctttgcacctgagaaatcaaataactcatcaaaaatatccatgcaataacctcaattctattcctaaagctccatattttctgatttgttcaggggcataataacgttccatatcctctggtctggctgtttctatatcatccaatgtatatccacattttagcaaatccatcaagtctaatatctcggataagggtaaaactctgtctctttcagttctgctctgccattttcaaaagcatccgtatcccaagaaagaccgaactcttcgatactgtcatcggtgaggaagtccatgaggtcgctcaacccttcagtggcaacctcgttgagagtctccgcaaaataagccagaaactcacgcgacaagcccttcttaggctcataggggatagtcaccagatagtcctcagcatcaaagcgagacttgacagggttgtaaaagagtacatagtcctcaaaaacgatgtcctcgctactcgtctccccctggtcgtccacggtttcaatagcagagctgttttgtgcttctaatataaaagtgacttctacagtatgatttttcttatcccaatccatggcaaagtcatactgtaaatgcttatccaattcttcttctagtaccgataaaaatccaaatttagccatcttatgtccttattttctatttattctttcttattataacatgaaatagaagaaaaacgttacagactcaggttaatcaaaaggtagttcctacttatttttatgttacaatagtctcaaagactagccgtttttgactgacttcatactatgttaaaagcgtcagccaagagaaaaactctatatagaaaatagaaaggatttgaatacgggactaattttctagaagaaaagatgaacttcctaatgtctgacgacacttcgtcgttccctatttctttacgaaaattttcggtaaaccgaaccgtccctttgtatcatcaattatgattatcagacctatgcaggactgcgaccgtgaggcagttctgaccttacaaaatactggctggactgctcttacctctcctgtctatgaccgcaagtggactgagagtgatttggagaagaatctggcaaatggcatgtccttctttgtcgctgaggtcgatgataagatcgctggcgtcttggactttggtccctactatcctttcccagctggcaagcatgttgccactttcggcattctcatcgctgaaccctaccaaggtcagggactgggtaaagctctcttgaaagctctgctaactgaggctaaagctcaaggttacatcaagattgccatgcatgtcatgggcaataacagcagagccatttccctctatcaaaaatacgggtttaccgaagaggctcgaatcactaaagcctttttcattgaaaatcattatgttgatgctttaattttcgcaaaagatttggagaataatcatggctgacaatcttgctctacgtatgcgtcctcgcaatattaatgaagttatcgggcagcaacatctcgttggtaatggcaaaattattgatcgaatggttgcagctaatatgttatcttccatgatcctatatggcccaccaggtattgggaagacttctattgcttctgctattgctggtactactaaatatgcctttcgtacttttaatgccactgttgatagtaaaaaacgtcttcaagaaattgcagaagaagctaaattttctggtggcttagttttattacttgacgagattcatagacttgacaagacaaaacaagattttcttttacctctacttgagaatggcaatattattatgattggagcaacaactgaaaatcctttcttttcagtaactcctgccattagaagtagggtacaaatttttgagttagaacctctttctaacgaggatattaaaaaagccattcagctagcaatttccgataaagaacggggatttccttttttagtgacaattgatgatgaggcgctagattttattgttaccgccacaaatggagacctacgatctgcttataattccttggatctagcagtcatgtctacttctcctaatgaagatggtagccgtcatattagtctagagacaatggaaaatagtctgcagtgtagttatattacaatggataaaaacggagatgggcattatgatatcctatcagccttacaaaaatcaattagaggttctgatgtcaatgccagcctgcactatgccgctcgtttagtagaagccggagatttacctagtttagcaagacgtttgaccattattgcttatgaagatatcggcttagctaaccccgaagcacaaatacatactgtgactgcattggaagctgcccaacgcattggttttccagaagctcgtattcttattgctaacattgttgtggatttagctctatcacctaaatcaaattcagcctatttggctatggatgcagctttagctgatttacgtcgttcaggaaatttacctattccacgtcacctaagagatggacattacagcggtagtaaaaccttgggcaatgcaagggattacaagtaccctcacgcctatcctgaaaaatgggttaaacaacaatacttaccagataaactagtaggacataattactttgaagccaatgaaactggtaaatacgaacgcgcacttggttcaaataaagagcgcattgataagctctcagactgattgctagttttaaaaatcgcaatcgatttcaaaaatcgataattttgcttgaaaattttataaaaagtggtatcataaagacatagaaacattgctgtggcatacgaatccacatctaagtgttgaccgactatttctttgtatttcgggaaacgaagtcatctctagtgcgcaagccgttaacacgcggaagccacttaaagaggtgcgagttacccacctgcttattttgtgcgggatcaatacaaaaagtggatcatcggtgccaatacagcttcctagcctccttagctcagttggtagagcagtagactcttaatctatgggtcacaggttcgagccctgtagggggcattaaactatacataaaaaagcctttgattaaaggcttttttgcttgtctaaagtggatttgtcccatcttttgtccccgaaaaattttttaggatgaaaattattttcttctgtattatttcgttgagacaatatacatataaatatcactttgtactaatttaaacttcacttttctcaaaaatgactttagcagatatcaaactgattaagataataccgatgactaagagagttggttgtaataaatctttgatgtcatattgaccacttaggatttggctttgtttctgaatcaacaacatgggattccattccttggtaactttgaaaaagccagagatgaaaaaggctacaatggtcatcagacaagctattaatacgcctgcagttttacgaaagattacagagtaaaaaagaatgagactcagcaataataatccaaagatccaggatgtaccgtaaacaataagtttatgctgaccatgattattaaaataataaagtgtataagcatactgggtaagtgatcctagtatatagctgatgctccaaataagtgtcatcatgataaattttgctaagataatggcttttttgcttagtcctttggtaataagattaataagtgtacctctggtaaattcttgagtcaaactaccactaaaaagaaaaactaatagaatcaatcctagctgattaatatttttaaaatattgactataagaatcaaggtaggttgggtcaggaatagcttcttgcagtttcttaggcaaaatccctgccatgatttctggcatcagtaatgctgtgagtggtcctaatattccgaaaatgattgaaataaggagaagggcaagagctttatgactacggctattttctagccactcttttttgagcatggggatcaatccggtcatttaatcacctccaaatagaagtcttccaggctatcttccagtaattcaatgaagtatggcgtgatttcttgctcaactaaatacctgtaaaaacttgctaatgcttgttcacgattgtttgcctcactcaattccaaatgtaccttataatattgatctttttgatttaaaggaaatcgcagagctaatttttgtgcttcattgtctgagacttttattaaaaggttcagttgattcacactggctgacgctttgtctcttagatcttctagattatggatacctgattttgttagaattagaacttgatcacagactttttccacatctgataagatgtgtgtcgagaaaatgactgtcttttgaccacgtagttgagaaataatggagaggatttcttgtcgtccttgagggtctaaggctgatgttggttcatcacaaatcagaattttaggattgtgaatcagtgcttgggctagacctaagcgttgtttcatacctcgagaataggtgctaatgcgttgctgattatcggctaagccgacctgttctagcagatcagcaattggtaaactggttttgttttgagctaagccagcgcaaagttgtaagtattcttgtgccgtcatatagtcataaaactccggaacgtcaggcaaataaccaataacttgattactttttgtctgcccaaaagtcactgggtttcccattactgaaatggtaccagagtctactttcaataaacctaaaatcatcttaatggtggtggttttaccggccccgtttggaccaacaaagccataaatcttattttcttctagctctaaggaaacctgatttaaaatgatttgatccccaaaggatttggacagattttgtaaagaaatggctgtcatgcatttttcccttctaagctaagaaaagcaataggtccaaggagattaacaaaaaggataattagaacccaaactggtttagaaaggtagtttgtctttgttatttttcgtaattttaagagtgcaatgatgataaggataacctgtaagaggataagagggataaagaaaggtaaaaattggctagggatgttagtgttcatctgaaatctccttttcgagtttttttaaagcagcaagctgagcttggaaggacttttcttgctgtaagtattgaaactgtggactatgaaacagggcaattaccctttggattaagatttgagaattggttggtggctgaattcctgttggtaactgttggagccaaggatcgatggcatcaaaaaagctgtcgccatgcagttcaaattgttttaataggtttcgggtagcctctgccaattgatttaagtaactaattgctttttggggctgactttcagcgaaataacaggccaaactgtagtaagaggaaatggctgtattaggatgaagctttttgaggtcaaatgtggccataagattttccagtcgttccaaaatgaattcttgccgttcgggacattcaaaagccgttaggcttaacagatattggcaaatcagcagaatttgctggtaaatttcaacttgtaaaacttgttttgcttgctctgtttcccccttagcagcgaagctattggccaaaaataactcctcaccaagtttataaggacgattctgataaagtgcgataatatcatcgtattttttttgttgaaaaagtattactacttttaacatgatggcagactgaagttcagattcaacagttgttttgctgataatccgattgattagttctaatgaccaagggttactatcaatctgagctggattgctcaaaaccagttggacgaggagtaaaagggttttgttatcattgatataatgttttgctaagtcttgaatgttatgaaagaattcagtcccattttgttggtcaatttgtcctcgcaattgttcaaaaagatgccctctttcagagtcagttagtgttttttgaaaacctaccaactcatctaaagtcatatcaaatagttttgccattagaatcaagtaatcgatatcaggttttgcctgattgttttcccatttggaaattgtagccttggttaaatgcaaatagtcactcagtttttcttgagtcataccaagacgtgtgcgttcaaataaaatagtatcaccaatcattatgaacctcctttatttgttattataatgtttcctaaatgaaaaataaagttcctatttagaaacaatcctagtaagaagattctgtttaagaaataaaatttctttcatgtcacagtacagtacatcagtcaattaaaataatttatttccgtcctttttaaactgtagggaatcatatgacacattaaaaatttttgattaaaggcttttcgcctatctaaagtagatttgttccatcatttatccccgaaataaatttgaaatattgttatattgtactcatctcaatcacgaacaatataattgaaaaatggctatttttgcttcttttaattagtagtatgatataattttgtaagatattttgggaggttaaattggatataacagcttatcaaaaatgggttagtgaattttacaaaaaaagaaattggtaccagtataattcgtttataagaagtaattttttatgcgaagaggttggggaattagcgcaagctattcgaaaatatgaaattggtcgtgatagaccagatgaaatcgagaaatcaaacaacgaaaatttaaacgatatcaaagaagagcttggggatgtattggataatatttttattctcgcagatcaatataacatttccttagaagaaattattgaggcacataaaaacaaattagaaaagagatttgaagaatgaaaataactgtcttttgcggtgcaagcaacgggaataacccaatctacagtcagaaaatagtagaacttggtgaatggatgattaaaaataatcatgatttagtttatggtggcggaaaagttggcttaatgggagtaattgctgatactgttattaataatggtggccaagcaattggcgttatacctacatttttaaaagatagagagatcgcccacactaatttatcaaagcttattgttgtcgaaaatatgccacaacgaaaagggaaaatgatgtctcttggagaagcatatattgcattacctggtggaccaggaactttagaggaaatttcagaggtaatctcttggtctcgaattggtcaaaatgatagtccatgcattctttataatatcaatggttatttcaatcacctagaaagtatgtttgatcatatggtctctgaaggcttcctgagtcaaaatgatagaaataacgtactattctcagacgatatcattgaaattgaaaagtttattaaagattatcaatcacctacaattcgtaagtatagcaattaaataaagaaaatagccatttatatttggctattttctttattctagttaccatgttattctaacttttcaattttattcgaaaataaagaatcatactcagaaatatcttcatctacaaaaaattcttcaatagcttctttattattgatatttagttttttacctatacttttttgttctaccaaatttttaaattcttcatctatcatctattagcacctcgttattaaactatcaccatagttgttttatctcattgtactcttcttgaattttttcttcaagagtatgaccatagacttcaattagcatagaaatatctttatggccaagaattttcgcaataattcctagatcatatcctctatgccataggaagcttccataggtgtgtctagcaccttttgttgtaatgatgggttctatattcaactcttgaacgatgcctcttaaaaccttatttgtaccgtttgtactcggtacactattaggataaccaaaatgttgaaataccatattgtttgtattttgtaatccaagctctttatttgattgattttgttcaatcttaagatttttcaagatttctagacactcattatcaactggaacaattctgattgaggttttatttttaggtggaacaaactgacttgtttcagagttaaatcttctatatgttttaaagattcccttatcaaaatcaatatcttcccaagttaaagcaattaattctccgtatctcatacctgtttttaataaaaaatagataatatatggtactaccgatttcttataattgaatttatcttttacagcattaatgagatccaaataagctttttcactatgaaggtatttactatctgcatcctgactttttactgttgagaataattctacattttgagtaaaatcttctatcataaccttatcagcaatagccatttgcaaactctgtttcacgccagtatttaaccggcctaagaaattgcgactaactcgttgtccatagttattcataattcgttgatattcactaggtctgatttgagaaatgggtttatcaccaaatagcttttcaagcgttaccttccgactaagatatttctttttagtcacatcacttctattactaggcatgatttttaaatctagccattcttgataaagttctggtaatgaaatattttttgtgattatgctaccagttctcaatttttggagaataggctctgcttctgcctctgctagtttctttgttttaaagccactattataagcaactgttttaccttcctctcggatttcataagcccataaattctggtttcctctccttctatatcttgcatttgccatatgttatacctcaagtccaatcacttctgaaactgcacttctagggacaaccataagacgtttacgatcatagaaagtataaccacgttccaccattaaatttctagcttgatggataatatggtttgctgttgaaggacaatagcccatttcaattaagtctttattagtcattacattatttgtcattgtatttttttcctttcgtgttataatttatctagaatattttttctatgtcgacttctttcacaagtcggctttttttatgccccaatattcagagctttgctgttcacgtacatattgttcaatctccttttcgtcattatcagtaaacttttcaactcccctgcgaagtaagtcttgtaaaaagacctctgcctgatcgataccgtaggcttcgtattttgccatataaacctttgcaattgtctttgacacttgtttatcagtccacgcttcagactgccttaatgttggtttttctctcacaatactcagtcgtgttttctcctctgtattgatatagttttgccaccatcttacagattctcttcttcgtttatttttatctcttgcttttggagaaacaaaacggtaatgtccattgatagcctcaaaatatatagaggcgagagggcgcatatcatttagctgatgagcaattagattagccttctcttgccaacatcttagctcagctcgaacccatgaattaatgtcaatatccgtctgtaattttccattttgctccattaatttattataaacacaccattgttggtttcctcttgcaccaaagacaactgtttcaccaacgagttcacctgaatcaataacgaatttttcatggtactctgcatgtctcgcagttgttatacataagccttttttactatactcataaagcctttgaacatttaacgactcatcaaaaatatcattcgcaatatctaatctggtaaagttcgaattattatcaattagtctctttactaaactagtccaattattatcattaccttctataaattcctcatactgccgacagccttgtccttttagttcaacatgaactcccatgctactattaggatctaagttaaagtaaacttttatctctgaacaagcatagtgacgttgatacttattgactccccattcgttcaaagtaaaattggttaaaggtattaataaaagtttctctattacatactctggagtgacatcttttactgtaacagcgaaataatctatcttaacgctgttaaacaatcttattcacctataattttgatatctgaggtagtcagttttattccaccccaaccttttcgatttatattccatgctagacgaacttggggattaatcaattcaatcgttttttcaataagcccatcattgcttgcaattttactaatcttatcaagattatccaagatttctaatggaattgtttttaagtcgtcggcagacattcccatttcttttaagactttaactttttccgcatcttgtacttggcaagttatttttgaaatttcatcagtttgaactgattcaccattgatattattatatttattgttaatacgtgcggataagataattacttttttgggaatttcaaattgagatttttccaagtttaagtcacctagacttactgtatctgttaatttaattgttgccatttttctacctcattttcataataaattatttgcatcttttcttcctgtacacgaaagttactatcagctctactctctcaatggatttcagcatttaatggtattaaactaccttcaccccttatgtatcaagggtttgagcactatttcatgtacgtgtgtaccccctattagtagcggggtaattattttcatataaatttcaaaagaattttcacagattattaacttatcaaacttaggtttgtcctcgagcactctgcttttatctcccgagtcgctatggcttccagcacctcgctcctcgttagataatcgattgctctcagaaacctcgcttaagtttgttaaatatacctgaatccttctcattttctaaaatgtttaatcgctctgtcagctccttaacctgtttctgtaaagactgattatttttttttaactgaaacatactatcttctgcttcaaataagaatttatagaaatcctctgatagcattttcaattcattttttatatctcgttcggactgagcttttgagtcgccccagacttctttaatagagtcatctaaattctttgtcttatccactaaatgagataagacaataaatttagtaacttctacttctgtaaaatcaaagaaaacttgtgtgctacgcttagaaactcttctcctgacttttttaaatttgtatccagataacatttcaattcgtaaacgccatttcttgattgtactaaccgacttgtttgtttttaaagcaatttctttataatctatagcattaccacctatataatatatttataccttattaataagatataaatatattatattcttatccaatcaaaaaatcaagataaaacttgcaaaaaagttatatcctgataaaataaattatatacaatatacgtgagggaaaattatgacatatataattcaaaatttcggtccaaatttgactagattacgaaaagaacgtggaatcagtcaagttgaactttccaatcaactccaaattggtaagcagtcaatttctgattatgaaaagcaaaaggcgtttcctacatttgctaatctagataaaattgcagaatattttcgtgcaacccccactcaactattcggaaccataaaagaaattgagctagagaatagtgtcttagaaacagatacttatacttcaaaagcagatcatattcttaagtctgttaaagaattttatgaactaactaattatcttaatgattttaatagcccagaattttacaccagcgaaacaattaataatttgtatcatcttattactccaaaaccaatattggatccagaaactgatgaacaacttatgagatttattccaactggaaaactagtacgagcagaagatattagcggaaatcccgaagactatgaattggcatttaaaccaagtccacttactcaaactttaagtagaatagatgaaataaatgaactttatgaaaaagtaaggtttgttgaagcttttaaacataataatgaaactaattctagataataatatatacaaataacagaaaacctaaaacgatatataatatttttctctttacaatagtaaaaatatactgtaaaatggacgtaagataaaaacagttattctcatagcgcttgtttatcgtcgtccaaaaaaagtccctcattgcatagcagtgttgggacttttttatttagtaatgcaataaatcaaaagctttcaaaaatcttcgtctagacgtttcaaaaattccttcatcaattattttttcaactagcaaaaataattcttcttttggaaaatttttaatatgagttgctataaaattatatctaacattgtccggtacgtcagcttcaagtatgccaacaatttccgtttgtctttctaacgtttttgagtgtagcaatgggacgccaatactactagtaaagtcatctaatgatagctcttcttcctttgataatctttttttaatgttttcagtgtacttatttgaatctttagaaatatattctgacattgcaaacatatatttttttattggaagatgacttgctactggttgggttgcaataaatcgaataacaatttcctgaggaattgtttctttatctagaaaatatgatctaacatactctttaaaatctggaaacttatatatgtatctttcatccccaaaggcaacaactatatttttcgaacgaatttcatcctctgttaggtttgctaaatcttcataactagtcaagacagtttttaaatctttgctctctcctttaacttctattatttttcgaaatacattttcatatttcgctatttccgaaggtaaaaatccttgatttatcttagagattaatctataaatattggtaaaattatcagtttttaaacacgaatagtaaacgcttaagtcaggtaagcttgagaccactgtttcaatagattcagaatctggtagatattcaactacacctattttttgagctgattccgatatatcaaaaggactattttctgcaaaatctgtcaataattttctaatattttcatcagttaatgaatagcccaaaaataggattggtgactccaccaaatttgaaagtatttttgcattaattaatgctgactttgttacattcttttcatagtcttcctttgttatagttattgttgaagcatcatctacagttccatgtatcttatacaattcaccataatcagaagactttaaaaatagccccttatttcctacattaatcttcacactgacatttattgtttttaaacactcttcaataaaattatcgtaattagttgtaattattattcttgctttagataacatttgagaaaattgttttatctcctcaattttctcttcccgaatttttaagtttgagaatctatttgctactaactgtttaaatggagatatatttaattcataagctgtctttaagtctaaattatcaacttgaatattaccatttataaaagcttttgacacttctttttctaataatgaagctagattagtataaatatcaaaatcattgttttcaaatctttctcttaattcgaaggcttttgcataatatgattcttcatcaaacaactctagccatatatcttttaatagtttctcccatgtcggtgcattctcaaaatatctttgagtaatacctgaaccaacaaatataattgggaattgattgttttcactgatttgttctataaaattcactagttcttgtcctcatcttttattaattattagcttgttcaactgttaatcttattataacatcttggataccattttattaatttttattattaaaccatatactctaaaatataattgtcccctttttgtcccacattattttttctaacaataatacttcaaaaatttagctaaataaaaagcctttaaaatcagcattcttgattattattatcacaaaaaattgtaagaaatcgttgtagggggcattaataatattgtcaaaaaccttgattttaaaggtttttttctttgtttcagcagatttgttctagaagatattctttaaaaattagctttaagatactaaacttctgaccgtttcatattccttatttattacttctgtcaagacgtgaccataagtttcaagtaactgtgtaatatccttatgacccattaatcttgcaactacccaaatatctacaccttttgctaataagtaacttccataagtatgccttgcacctgttgcagtcatttttgaattaatatttaatatttttaaaacatttttaagacttttatttatcgcactatttgtcgaaacaccatatctatagtcataaaatatttgattattcatgtttacaatttttaagtttttcaacataacttgctgatcatccttcaaatctcttaagattaatgctaaagattgactaataggaatagtgcggatagaagtttttgttttaggtggactaaaagttcccttatcgccactaaatcttcgatacgtcttaatttctagatcttcaaaattaacatcatcccaagttaatgctaaagcttcacccactcgtaaacctgttttaaatagcaccagtaataaataataaacgatactatttgaataatccaaattgttttctaaataagatatcactttcttgtaatcaaaaatactatgtagatatttatcatctgcatccttaacaaatttcctaccagctatgacaactccatcagtaaaatcagataataagacaccatctcttttagcaaattggatagctttttttatatctgaatttaaccttctaacatggtttttagtgtatttttcagcgtacgtatttaatttcctctgatacgcactatgctttattttatttactttctgatttccaaaaagtttacgaataacagaacctcttgtaaaatatttgttctttgtagtctctgctagattgctaggctttataattaaactgtaccattcaaaccacaaatcatacaatgttatatcagaagatatagaatttactaataacttttgttgctctatcctcatagcttcattcatagcttcacgctttgtcttaaaacctgaaccagaagcaactaactcacttttttcattgaatattctataatcccataatttctttttacctctttgtctatatgttgccattttactcctttcttagacatcaaggaatttatcctcaatattatatcatttaactatttaataaaatagaaccaaaattatcttcaaaatattttctagcttttgttgctaatattttatatcgactacctttacctttcggataaacaataaaaccatttggattaattgataaatctacttctttttttatatctggatttaacaaaatatcattaatcaattttgaccttccaattcccaataactcttgcaagttatcaatatcccaccacttgccttgttcattatcacttaataaatttaaatattcttcttttgaaataataacaacatcatctggtacaggaacactcacattaaaaacctgttgcatactcatcctccttataacttgcttaatccgaacgttatttgttccaggtaattaggttttccactttaaaaccgaactatttttcagttgcagttttaatttaaaatccatatcccccgaacattattctttaataaaaaaacaaacaaaaaaagccatgaaattaatcacaactttatttctatcaacttcttatccttcaagatcatttaatattcttcttaaagtactttttatttcttctgcttcgctataaccgacatcctcaaacctagataattccctttcaaaacttgaaattgatttacgtaattttgatatttcatcatttttaggttgatttgataaatcgactattttttcctctaaagaattaacttttaagcctaacatttgattttctctgcttacttcaccaaacttcaaaattaattcattagcaaaagccattttttcaataagtttatctccatttttcacatgattataaacttcttcctttgactttttctcaataagcatttcatcacggatatatttagtatcttctttaacatatgagtttttttgaactaattcttgtttattcttttcaatattgtttgataaattgctttgtatcagaacatatttatcatattgatttgtcgaaattttggaaaattcgtctaccaatttctcttgaccttcttctaaaagctcaagttctcgttgaatagctttattatccctagagtttgaaatcaaaactcccacatttgtaaaaataattcctacaacaccacctaaagtagcccaatccattactgaataatcccctatcattttttctcctattctatcacattttattccaatctgtattatttaattaaaaaagccatgaaattaatcatggcattatcttatttttcacttttctttttgaaaaaggttaaatacttttttatattatctttaaaaccaatccaaactgctccagcaattaacaagagacctactattgtaaagatagtcttaccctcaccagtttttggcaatacttctatttttccatctgattttttaattgctacagtaccgtctttttgaacatttccaccaacttcagcagcatcttttaattgcgtacctgatggtgtctgtactaaaactttaccatcttgagtaccaatgacttgatctcctgttacagttgtaataggttgattaatagttggctttgttactggttttatagatgattctgaatgatcactaggtttattcgtagaaggtttgtcaataccggcatttggtttagtaccattatcagtaattccatctactggatttgttgtacttgatgatggagtacttgaatctgtcgtacctgttgtttgatctgtacttggtgttggtgcacttggttctgtggtatctgttattggatctgtacttggtgttggcgcacttggttctgtggtatctgttattggatctgtacttggtgttggcgcacttggttctgtggtatctgttactggatttatacttgatggtggtggcattatagaatcagatacacctgcatctacccctgatagcattatagtatcacctccactaattacaacatctgcacttgctgataaattaccagccattaaaaatagtcctgaaacagtaattaaacttaaaacttttacttttgacataaattttccttctttcttaaaatactacatttacaggtgtaccatgtacactcgcaatctcaaattggtctgtacctaatacataattaccagctaaacttaatttgtctcttttatctgttactaaattaatagtaaactgataaacattactcgcatctgactcatatacttgtaaactttccaaatcaaaatgataaccagccatcaacatggtttttacagtttgggcaactgtaggatttgtaatggataatttattttgataatcacccttaatatctgattgtgttgggatttttacaaggtaatcaataggtacagttatagatcttttaaccttctccttttccttatcagatacttgacgatcactagcttccaaagtagattttgcttctttagttgaatcataagacttaaccttatgtttcggttcaactcgttcaacttttgtatgattaccacttgttttaatcactggattatctttttgaataactttataaactataaaagccatcactaacaccattaaaaataaaactatttttctacgtttcattaactacctaccgttttcactttatcagacaatttataaccagctttagagggattataaaaactataatgctctttttttaattctaaagtagaaacataacgataattccatgaatatggtccaaatcctctattatctccagaataagttgaataattttgctctactattaacatatcgccattttcaaatacatgactaaccactccagtatgcccagcactagaagtacctgaacttgaaaaaacagctccagaagatggagtattttcagagcgtccaccgaatgcagatacccaattagaaacaaccatattaccatttcccattctttgcgttggatgcattccgcctttaagccataaaccatacatcaaacttgctgaaagatctgtacattgaccaccagtagaagctatcgcattccatccactagacgttcgataaaataaaccaactgacttaggatctattgcatactttttcaaatcacttggtaattgatctggtttccatgcattataagaagtgtatttaactttccctgacttatctttaccaaataagccctgtaccgcattactagctgaatcacaaagagataaaactgtagaatcagaaattatatcgctcttaccagacgaggacgtttttgaaccaccaccaaaacttttagaaaatttttctgcatcaaatttatattttgaaccattaaatatttcataggctttttgcccatccgcagtcttttgagctttattaatatatgcagtatttcctcgttcgtaagcattccaaactaaagtggcctgcttgggatcagtcatctgtgccatctcttcaaaagaatgatttccacctgataaatccattgctttattccagtctcctgatttaatggatttcataacaaaggcattcatggcatctgcatcttcccatttgggatcgcctaatggggcatactttgtgaaaggtgtgatttgataaataccacctccagcttcagtcgtatagtaagataacccagtaggtctcacattaaaggcaattgaatttgtttttaaatcattaccataatgcccttctgctcgacctatcatagcaaatccaccttctgaattaacccaaccaacaatccctgatgcactcgcaccagataagcctttacttacccaagcattgaataccttctctgctgtttgatttgcaactgttcccttttttgtccaatcactattggaagcattctcacttgaggtttcaacttgtgaagatacatctggtgtaatttgacaatcttgttgagaacttgacgaagcagtcaacaataaaaccaataaaaaaggaaatacaatcagtattcccaaacagcctaattttttcttatgttttactttagttccctcctttcaaacaaaataaaaaagctccaacaaaaattgatactttaaaccactatgaaatatgatataataatgaagcagaaaagttaagacggtggctcttatttctgaaaggtaggtggtcccatgggcaattcatcaaaatccaacagaaaggaggagctagatttgtctacctttgaggtcttaacactcatgtttatagcaggtaacttcgttatcgctctcgtgaagttagtccttgaactggtaaaatcgacaaaaaaataaccgtctcaactttggcgagttaacggttattttttaacggttattttctgccaccgtcttaaacggttctgctaagcagttgttagaagcaactgctttttatttacaattatattatacataatctaaaaaatagtgtcaattaatatatagtttactaaacctctcaatgtcataaaactccttgtactacttaccttctctcagcttttctagttcttccaaaacttttgactgtcgttcaagattatgttgctttctaacttccttagttttactggcattaaatcccttttcaaaagcatttttaccatgattttttgtcatggatacatcactattaaattgacttaattcaccctctagcttattaagctttcgctgttttaatggtgaagtatagttatttgaatgattttctatatcatttgttatcatatcctgatttgttaatgaagtatctccatctccttcttgaaacgtgtgattatccgacttaacattttttaaaatttcctctgttgaattaccttctgatataaacgatagctcataagaagattcctttcccaattgttcaatccttttacttgcttctttaggtaactctgattgatattcaccttcattagtcagctcagcctctttagaaataacagtatcatccgcattagcttcatcatacttatcagcatcattagttttagactgaccatcatctaaattagcttgttgtctttctttgaaagcattccaattatcttgtgcattcatcattgtaccaacaccatagccagctcccatcatggcaaggcttgacatatcgtgtgccctctcataaatggattttggcgtaattcctagattttctgctttttcattaattttatctacagactgattaatgacttgagaagctctagaccctataatcagtcttaagaaagtttctttatatttccaaattccccaaaacacacaaccttggacgaaaactgttattagcaacataaacagtattgcctgacctttaaaattactaccactaagcagggaaccatctgtaaattttttcttaacaaaggtggctattaaagtttgagtatagaagactatcaaggttaaaaaaccagctaaggcaggaaaggaaacagccccaaacatgactttcaaaacattgaaaatgatatcttgcattctaggcaaaaatgaaactaataaagctaatggaaaaataaacattaatataatcactaaaacatctgccataaaagcaattaactgaatgagtattaatggaactgcgagtataaccgcttcaaaaatctttaagataacatagcctgattttatccaaagataatcatttactgcagaaagccatctatttttttcctccccttcggttgccttatctcccaaattatcagtataattcaatatatccttttgttttggagtgataaatttacctgatttatcgtacttacctaaaacttgttcgttatcaaacttttcttctttacctgtttgattattgtgaaacttaccatttaactgaccagtattgacaaacaaataagccgtataagaagttttcatcacataattatcagctactgatgatttttgtgtgatctttgttttaccacctgatggattatccagtgataaattagttaccgcatctgaaaacgaaccagctagttgatgaacggtatctaaaatataaataccacctgatgttgattgaatcgtaccaaagtaacccatacctaaaatgataaccacgaacaagtggatcaaacgtttagaaaaatctccttttgaaaaaagatatgaaataaatattgaaaaagctgaaatcgcaaccaataaataaagcaaggagcttgtataagacccattacctgatagattttcccataatttttgagacgaatgataaactgtttgtttataggtatcatacaaactgaaattttcaaaaaagcgtagaataacagaaaataaaccaacaatcaagttaagtaggaaaaagggaaaattaacaaaaacatctaacaaaatgctttgagctccagtctcagctccgtgagttatctccatataagcctttaacgcaaatatatccacatcttttaccttcgcaaaggtcgaagcaatcaaaccatcatctattttgtccatctgattacctcccttctacgaagcatatttattttcaaggtgacttgatactgttttcttcataggttttaacaatggatcaatatctggatgaatgttatgtatcgaaatcatattcaagttaccgtaaacatcataataaagacattgacctgaaatcatattatcaatccattctagattcttaggtgttacttctaaaccaacatgacttaaaatatcttcacgttccgatttttcataaaatgaaaaaattgtcccaaagccggtcgtatcatcatcgttttctgcatcatgaaccgattgagatactagcatcaacacattatacttagagcgaccaacacgacgcatagacttgataacagccttaccttctgaggattgcataagtacccatgcttcatcaaaaatttcaactgtttcatcatcactacgctcaccaaaatgcttacaaaacgcacctaaagcaaacattaaagcaatcgaattactttcatgatcagatatatgatctgaaccgtccttaggcaatgataaatccgcaacttctaaaactgtcacacgttcttcgtaagaaagaccagcaacatcaccatctgaaaatgccaactctaaaatagaattctgaataatagctttaaaataacgaccaactgactgaacttcatcactttcagaatcaataagaacttcaataacctgattaaaaccaacgacttcaccagcttcacgttttgcaatgacttgactaattgcttctgttaaagctgttgtttgatctaatttaatctctgtagcgttttttaacaaataaagcaacatatttttagccgttgaggaagcaccttccttatcaagaataacaataggatctaatacaccatgattttctttgacagaactatcaagagtgacaaaattcgtttcctcaatttgcttcttacgtagaggaaacttacgtgcatactctggatcagaaacaacttttaaatagtgttgccgtagttctcgtttagggtcaacataaaggacacgaacattttgttgagcagtatgtaaaaagatcatctgtgctaagtatgatttcccttgacctgtcgccccagttataatcacgtgaggatttttagtaaccttaccagcaacatcttctttattcgcgactgtcgcattaaataagacaagatttttagatcccataatagcttcgtcaatagaatcccaagcagttaaacgattatctactcgtccaatataccaaccaatcctgttacctgattgggtatttgtaaaaagcatcaactccgaaaaacctcgagcagttactaaatgattccacttacgagttgttttttgtaaatcttgaccataaagtaacgcttgaaataaatatggtgtatcatgactggcttcataaacattgactttcatatcatcaaagtaacttaaaatggcatatctacgttgttttagttgatttaaactagaaccagcaactaccaaataacaaccatactctatgatttcttccttatttccaacttttttcataagatccttaagcgaatatgctcccatcaagatatcatcttgttgaaccgtatttgtgttataagcttctttcatgatttgatcatagcgtgtatttgagcgacccatagtgccacccaattttgtcttatctataaattccgctttaaatcttaattcaaccggaaaactcattctttgaactagttcaccaagatgaaagccattaaatatggtagagaaccgacctactggaagaacggatacaaatgaactcccataagcactctccaattttaaaaaaccaccttctagtgatttaatcaacgtatctgtcacatttaacatattccgattagctataacctcacttttagtatggggaacatatcttaaaaattgcatccgttgataataaaataaatcaacatccgttaatcttttggctttcagggtagacaataaactatagacaagtaattcttcttctgaatgttctttataccaatcttcatctacttctacctcataaccagctaaagaagcgaagtttgatgcgatagattcaaactgattataaataaattcttttatattagcattgtattgccctttaccaagatcaactccaattaaccaatcaaactgatacggtatctccatttcatgtgttaacgtatcaactgtaaaatcgagtgtttctaaccctaattctttaacatcatctgctagatccgcttcaaaatccgacattttttcaccaagaagataatcttttggtattagacttcctgcgaaactaaaatcctagttcacggttgatcattccagcaatcaaattcattcgtaatccaaaccgtttgcgtcgatttcgataggttgttgaaaatattttaaacgtttttactttggcaaaaatattctcaaccttgattctctctttggatagcgtatggttataggttttatcttcaagagttagtggcttaagtttgcttgatttcctcggagtttgcgcttgtgaatacatcttcatgatcccttgataaccactgtctgccaagattttagcagcttgtccgatgtttctgcgactcattttgaacaacttcatatcgtggcaatagttcactgcaatatccaaagaaacaattctcccttggcttgtgacaatcgcctgagccttcatagcatgacatttctttttaccagaataattcgctagttgatttttttaggacgattgatttttacctctgttgcatccacaatcaccgtatcctcagcactaagatgagtttttgaaatcgtaaaaccactttgaataagagttgattcaacccattgacttcgacggattaagttgctttcgtgaatgccaaaatcagccgcaatttgttcataagtgcggtattctcgcatgtattgaagagtagccatgaggagatcttctaagcttaacttaggggttcggccaccttttgcgtgtttacgttgataagctgtttttaacacagctaacatctcttcaaaagtagtgcgctgaacaccaacaaggcgcttaaatcgtacatcagttaattgtttgcttgcttcataattcatagaactattgtaccatattttgtttcgcaggaagtctattaatgaaatatcaaaatttttatatttagctaattttttgataacctgtgctactttcgttttgtgactatctttcttatcactatctgtaatagtgattggggtatttggaatacgatagtatgcgacaacaactttatcttttcgtaaagctaaattctgatgtattctatcaatcggatattccaatttttttaccatctgatctcctttcttagtctttatattttcgttttctcaaaaactatttcttcttcaatatcaacacgttctccttgatagataccttttttatttaacccaaaatctttgagataaaccagataatcccacaaaaagatatgcatcttttttccttgcggttcatattctacataaaatttcgctaacttgcttggaacaaaccaatacaagagcattgaaacggaatgcgttaaagcatttaacacctgcattaatggagaacataccgtcagcatcaacattaagatgataaagaaaacaataaaaaatgataactgcataggtgtagaaaaataccaaatcactttgccttttgccgttttaacttcctgaatccagtaaggagcattcaagcccctgctgtaatcaaaatatttttcttcttccataacttataacttataaccccgtctcaacaccaaaccagcgaagcattccacccaaaaaagatagaatctgttgacctttaagcattgatacaataatcgcataaatagctaaggttgagaaaacttttaaccaattagcttctttccaattcttaataattataaagacagcaattacactaatgaggtaaatcccatcaccttgaaaaaattgctttagtcctgaaacgttgggaccacctgctaaaataacactattcacttttactaaattcattttttccctctcttacacctctatttaaaataatgatacatctcttcaacataccaaccattgtctgctttaaataaatataatgtaaagttttctgatcgtgtgccacctgttacaagatcttcaaaagttactgataattgcacgacttgatgctttttttcttgataataaatcgcattattaagatctagctcactaactttaaatcctttccccatcagttctggagttttcattaacagtttcaagtctgtcttgttaattaaggcatatttattaaagaaaactggtaaaaacttttgaatagaacttacttgttctttcgatagttccttgacttgatctaatgttttcttctcaaatgctttagatttacctaaatacaaatcttctgccacagtataaggttgactaacgattgcaagcaatcctctttgcatctgaaaaggaacagccaagttcatctgatatgattttttatcaacttcataaccaatacgcatcaaagctatatagtaatctttttctttttcaacacttattaaacgttgtgtctgcaaagtcctagactttctaacatcatctgtcatactggcagttgagaaagaataataattttctaattctgtttttctttgatctgcagtatcttgtgaatagttgatatagtagtagacaaaattattcatgtaatactgaattctagatatatctaatgaatcatcagtcttcttatgttttgactttttttctacagcaataactgtttcttttaaatgttgtacctgattagataagccaattgccctcaatgatccaaaaaatcctacaataaataacaaacctaagataccatagacaataaaattggctgtcctttgctttacttcttttgtcttaggctgtttacctccctcttctttctttgtatatctcaatagaaacttttttattttttgtatatcaatcatttaacccctttctataaaataaaaaagcagtcactttttttagcgactacttctacttataatgatctctaaaagataaaaaatagatttctccatcttctatcatataaatcaacctatgttcttctgtaattcttcgagaccaagcccctgaataatggtattttaaaggttctggttttccaatgccttcaaatgggtctcttttaatatcttctatcaaacgattaattcgtttcaagatttttttatcttcctgttgccaagaaacataatctttccatgcttcttcagtaaaattaaacatcttctacctcaattaaaccatgtttagtgacttgcttctctttaacttgtgatataccattaataaccttatgtgatagataatcattttccatcaaacgaatcgtttcttgtaaactttcccagctatcttgagataaaaccactatattttcatcaggatttttattaactacaatcaaaggctcaaattcatcattgaccttcttcatataatcttttaaattatttctaaaatgtgaataaacaatagcctccatattaatcacctcaactttactagatatgttgttattatatcatttgacaacatgttgtacaagttttggttttgataatcactaaataaataacttacaaatgataacaatacataaattatcgttaagcttccaattacctcctcattctgtttttaacacgtaaaaaccttttgaggtgtttaatactattccttcttcaatataagcatttaaagcatttacccaagttactgaccgttgccaaaaatcaattaaagaatcaaattcaactttccttaagatatatttcattactttattttcattatttgacaaaaatatataatattttgtcactattgaatgaactgataaaccttttttcaaaagatattgaacaatatagtcatcaccatcataaagtccttcaatacatctttttaaaagatagacttctgtaagtgacataatcctatcaacattccaatcagaaaaaccacaaataaaaaaggcatcatccttaatgcctttttctatcatacggtttcttacttgattttccgtaaactgcatgatgtctaactcacataaaaattgacttctacctttttcacgagtccttataattgcaatcattatctacttaccctgatatttcgacatatccgtagtctgaaaaaccaccttggctttctaagtcaatatctcgaccataagcttcatgatcaaaatacatctccagagcctctttaccaactccttgtacgcctaattcatcgaaataatattcacctagttctcgtctagttgtgacatcagacagtaaacaacaatcaccaaaattaaaatcataatccacaaagtctgaggcagtataacctattacctgatgcactgctttaacaagttcactatcaacattctctaccagttcaacaaattgattaatcatctcaatagaatcatgttcttttagtaactgacaatccgaatctgcaataatatactctaaatcatcttcttcacgaagccccaaagctaacttaagctcactcatttccacaggaaaacaaactaacgtagctctaccagtttttatatctctaacaattgcactaacatccatttttgacactccttaattaaaaaaggagcaagccattgacttgctctcacccttaatgaaattcttgtagtttatgaccaatcgctgacatagacttatgagccttattaatcatattattttggtagtagtatgatttcaaatgttgttgaatcatgtcgaccatataacctggtaaagtcaattcttcacgctttttaagtaagctatttaactctccagctttttcccatgactgttcatactgatggctgaccaacagctctgaaagctcctgagtaaccactaacaactttttatctgcttctgaacgtgttcctgacattttattttcctcttttttctttagactctaacaataaatcaacctattacagttggacatctaattttcataattttcacccacaaaaaaagaactcctataaagaagttctaattactcatatataaattacattacgaggattcaatacagaaagttaaaaattcatctaaattactcttatttgaagaaattaacttatctcttagctcttttatcgtctccacatcctgctcccctcgttctacaggaaacagctttttgtagtgtctcttttctttatcattcttagcataccaataaccaatatcattaaggacctcctcgaaattgctatcattccatataggaacaataaaatcttttttccaatcttttacaaataatgtagaactcttataggaatctatcttttcctgcgatgtatcatcaatatccatgataataaagattttaacgtttttgggatttccttttttatcgcactcaaccttgaaaaatttttctttaaaacattttttagttttaaaatctctattttttaaaatatcattaatcgaagatatttgtatagatgttttcccatttgacctcgagtatatttcaagaggaagcctcagttttgatttaatatgtttaacaaaatccagttcacttttaccgtgaacaattactatggcttttgtgtatttacgaaaactcatttttagtcctcgcttaaattatgatcaagaaataaatctgaaaaatcaatatctaatggatctggtacagcaccaaagaaaccagacaaatataatttttctaaattgttatttactcctatttttttatctgcctcattgccagaaatgataactttattacctttaatatctacatttaaaaaataagctgagctcggtgataattccttcaataacgttgtatcatgcgttgtaaatattaactgaccattcacacttcctttcaagtcattcagaatactattcattaaaagatcatgaatacctgagtcaatttcatcaacgatacatattttcccatccaacacattgttaaaaacttttagaagatccagaagattttttgttccctgagattctaaacttattggtacatctaaaagatcacctccaatattttttcggatcatgagttcatattttatttcttgaccttgagcatcctgcttatatttaacatcttttatatcaatatataatgcactaaaatatttataaataatttcctcagtataggaaagtttttctttttccgacttatcaattttaccttttgaaatatctttcaataataattctgtcgaatgaaaaggacctctaaaattaccactccaaataaaaattttatcaaattcatcaactactttttgaaaatttatagaaacttgttcattaataaactcttcatttacttctagacaataattattaaatattgataggaatgtatgtttaccccaatatttttctatttgttcagtcaaatctttaaaaatagtattcttaaaaattgtcttatttaatgattgagataaaccatctatgttagtaatactgaaatgaactcccttattggattttatcttaaatactagctcctcttttactagttcattattttcattatattctagaaggtaataaccattatctttttcgatattaaaataatattttagaatcgtattaccttcagatgcaattctatgagtatttttcgctatgcccttaaaagtggtgaagaaactgattttatctaagatttctgatatatcaccaaagttagttttttgattttcttctttatttgtttgttcttttaataatgattgtaatcgtgtattttcatttaaggattccattgattgtaatgacaaaactagtaacttaaaagcttcaacaatatttgtttttcctgaaccgttttctccatagattgcaataatatccttacattttcctctattcagcaaatcaaaagtcaaatttgaaaaggacataaagtttttaaattctattttactaaacatatgcatccctcgtttctattacgattttttgtttttaacatatgtacaatacaaattgtacaccactttactaaaaaacacaagataaattatccttttataaattaatatatataacctcttttgattattctgaagtcatccaaaccttcctcaaattagtcagtttcatattctcgaaataattcccttttcatcaatattctttttctaaccttaactctttcagtcttttagaaaaacttttcatattgttttttgaaagcacaatagtattactaaaattatcacttctaccaagtaaataatctacagtaacatctaggatatttgctaactttattatattatctaaagtaggttcagctttaccactttcccaattactatatgacttttgacttatatttaatttagacgctagctcagtttgagttagttttttttctttacgcaattcttttagtttttgtggaaaattagtcaacttcttcatctctaaacatttcccttctcatcagaattcttttttccaaacgatatttaccagctaaacgaataactatctctttttgcttttctaaaggttgcataagcaaaccaaactttaaaagtttccgtttaaaatcagcaagttcccttaacttatcttcgtagtctttttgaatttcataaacaccaacataaccaatcttaatcaaatcataaatgtctatctgataatctctaagctcacctgtttgaatctcaggataataaaactcacgatcaggaatcataaaaactagtaaatcaatcattttatctaaattatttcgtctattaacacaataagcaaattctcggttactatacaaaacaaaacttacctcctacaaaatacctaagctagctttgatactgtcaagtatcttctccccacgttcattgacttccccagaattaagaatggtttgtaaatagtcaccatccacaatcatgtcatactctcttatcatagctaaagacggagaaacagaatcacttaaccaacgtaaggttcgttcaatactataagcctctggctttgtaacaaattttaaaggctcaacacctccaaacattaattgccactttctatctgcttgaaacgacccatattcatttttcccatcatacacgtcaatcttactaacaattaaccctctggatatttcaccaatcggcactccagaaataaattcatcaactgccgcattagctttactttgagataaccgtatctcataacgattccacaattcaaaaatttctaaagcttcttcaacagtaattccttcctgctttgcaatttcataacgtttttcataaaagttaaaatacatttctgattgacgactaccaaaataaagcgatattccttgtctattctgctcaatctcttccatatccgaaaaatttaaagaaccgccacctatataattccaagttctcaaactttcaaaatctaactcatgacgataatattttgaaatcatatctgacaaatgaaactgttcattttctctatccttacccagatacaattcatcaatagcaatatcaaaacgtgtcacattcatatcatcacgatatgaatttcttagataacttaaccaatcatgccatgtaaatttttcagtttccatcaacaattccaattgtcggcatccacgaccagacaattgaacagttatttgaaaattacctgtctcatgtttatccgcaaaatcaaatatccaaatatctccacgtttccaaagatgattgtaattcatcaacttcgattcaaaaggctgaaattctttaaatgcacagtgcaaaaagttacgacagaaaaattcaagatccctaacatcctttaacgtaattctgacatagtcaatcatcacttgtaatcgtgaactatcattttctactagatatccaaaatgtgattttatctcttgatacttttcaagtgtcaacttccgctttccttgctcatagtttctaagtgatttcaatgtcaaaccagaacttaaagcaaattccttttgttttagacctgttttctttcgaaatttttttaaatagatagcatccacaataaacaaactccttcttaggattagtgacccacttttttcactaaaatgacccacctttaaaaatctgaaaacccttgatacatataggtttttgggggttaaaattcgaaatttttcatttcttacccccctattagaaaacgggggttttaaaattgataaatccctctgtaaagccctagtgtgtgcgctgtgtccggcgtgtccgttttcgctacgctacactacgcctacagctacactagggctttacagaaggatatttaaaaaatacccttcatctactattcacccttaaaataattcaatagtaactctttccagctaccctcaaattcatctttttgtgtcagtaaactttctaagacgactgcatcagaatcatttaatacaaccttttcatcttcacgactaaaagtcatataattatctttttcaatcatatctattaaattcttaatcttaccaaatgaaaaacctgttttcttagctaaatcaccaatactcatattttccatttcctccatttcatcatcaaaatcaaaccctactgaacccttaagtaactcattttcagacgttttttccacaaactctctcaaagattcgtctttaagaatcgccttagaaacttcctgattttctgtaggatcaaaaggattctcatgcctatttattttttcaaaagcatcataaaaagagaaatttttaggtaataaaggagaataaaattctcttgctacttcaccaaaaacagctgaataacctcgaccataaacacgacgacctgcaagatatttaataaacctaaattccttatttctattttcatcaccaaacatcatcacataaccaccatcatcgagacgaccaaccgagatatggtgcatcatattagatctaattttagtgggaagatcatctgcagacggcttttgcattgctataatcgcattacatccaacctgacgtcctaacaatatatattgagtaaatgcattatctacaatctcacgttcctgataagacaaagaactcattaaagcattatattcatcacatacaaaaaaataaggttccaatccataatcataaaactttttcatgtctttatgacctaaacgcttcatttcatttcgaacaaaatcataacgtgcaaacattatcgtaacagcattttcaaacttctcaataatatcagccttttcaaaggcaattctaccttcaaaagctgataaatctgacatagtaacaaaatcggctcttttagggtcacatatatcacaaactccaatttccgcaagacaacgaaggattgaccttagtaatactgttttacctccaccagtaccaccagcaactaataaatgaggatcattgatgaaatcccaataatagccatccattaacttaattcccttatctttattccatatcacatctttaaccgtaatacgtgataagaaagccgaataagctaatttgtaaattttaaagcgtggatcatcagttttttccataaaatccatgaaaaaagtatcttctaattctccaccaatatccttaaatttcttttgaaattttcctccagccatttcaaatgaaacacttaaatcatacttaccttgtttcacataaacttttggaaaacgatattttgtcttcgttttcttatttgattttttacgtttttcataaacatagccattctcatataaaaacttagacattctttttaatcgatctagtttattaaataatggattagcttcttgcaaaaaccaagtcaaataccaagaaacaaaaaatgctaaaaacaaacctgtacctacactgatcatagacattttatccatcatttttaacaaatctaaatagtaataactatacacgcctacaggtgtcaaaaacaaaataaatagaaaagaaaaaaggtaataactcatatacctcatatatggttttaccttaatccctctatattgtggtattaaacgagccaaattacccctcctttaccgtttatttattaactttagatgcttcattttttgatgcgtttccattatttgcaacatcctttttcttaagtgatgatgcaaaaattttaaacataccacctgaaacgttagaccatgtcacaacaacatcacttaattcaatagggtcacccaatttaagacctaaatcctcgattgcataagaaggcatatcagtaattgaaacaaaaattgtttcattttgagcagtactaaatactgcaatatcattccacttcacttcacctgttggtttttgtggataacgaccaaatcgatctggtggttgtgtcgtatcatcttccgtaaattgaactggttcttcatatcgtctccaagttaaatctcctaacaaaacatttacatccaatccatcattaaaggtacgatattccttatctgcaatttgtaatttttctccaaagtttaaaccaatttttgccatatttctaatcctctactttccttatttcacttcaataagcttttcagcccatacattttttgcaggttcaatatttctaccattaattgtattgtcaataaacaataacggtttttcaacagttaccatttttccatttccaatcacacgtgaagatgctggtgtataaacataaaacttaccatgtttttcattaaacaaaatgtgtcttgtataagacccttttttaccatttaattgagcaggtccagcttcaaatccttcataaattgcatctccaataaaatttggaagtaacactaatgtttcttgtttcataatttcctcttttctaaaaataagaagcactttttcaagtgcttctgaatattgactttttaattttctttgcgttttttaaatcctgctaaaccgatagctgacaagatgattgctccaagtgctgtaagaggggcaacgcttgcttcaccagtttgaggtaatcctttagcaggagcttttggagttgctttttgtggttcaactggttttggtttctcaggagtatgtgttaccacagtttcagttttaaccttattcccattgataaaaaagtctgcggtattgtaaacatcacctgctttgatacgtttaaccaccacaaaatcatctgccccaaattcactagaacgtgcaactttttcaaggaagtctttcttgaagactaattcatagagacctgtctttttgttgtaaactgtttctgtgtactctcctaaattagtcccttttttaatgactgtaccatcttttaatgtcacatcaactttagcgaccactttatcacgtaagtaaagatcaggtgtgcgttgtaattgatccacaaatttgtattcaaatagatcataagaacgacctgttggaactacccaaccctctaatttgtaagtaacttcatcacctaatttgacagtaccattgttgatagacttgccatcttctttgtctaacacatctttatgtatttctggagttgtcaaatcattgactacaatattacctgtatatccattgccaaagtcgatttgtgcaacaccattttgaatttgacctttagtaaactcttttttaactttaaatgataagttataagtaacatctagacctttttgaacataagctttataaaaagcttgtggatcttttgcagtccacatgtaaaactcaccaacaggactgattcctgcttctttaataagcgtttgaagtttctcatctaaagtatccgtagaaagcacatgtcgcatttctaagagttgtgacacatctgtgccatcagatgctttgattgagttcactttcatagacttaccatctagtgcgtcatctttataatcatcaataaagacaaagtttttagctattttaccttgtgatgcagtcattcctttatattggctaaagtcttgtttagcaacgtaatttaattcagcatttggtaatacggttttaccattaacagattgacctgcttcatcaatgacagcttttgaaggattagcagctggaactaaaacaggatgaacactaactgagtagttaatcttttcaggaatagacacatgtggtttcacttttggttgagctggagtgtaagtttttaatgtaggtgttacaaatttaggctcaactggtttttcaggtactggtttttctgcttcaggagtcactttttctgttgacggtggtgttggctgttttggtataacaacgttaggaacaacatcattattattaacataagacactaaagcagacccatgtgtgtcatgtacccagtcatcatgaatcttaaagacttcaacgcttccactagaaccatgtggtttaagctcatatttaagattgagttgtaaagttttgtttaaagtttctgcaaaagttttgttaccattatgtttcttctcaaaaatgatttgtccgtctttagttaagactctgaaagcaatattttgattaacagcagcattttgagcaacattacgatactcgtacttgtaaagagtgatagagtcaacaaatgctgtcacagagccatctttgttagcaacataatgatgattaactttacctgtcaatttcccatagccgattgtcttcacaccatcgatcatatcatggttaaactcgaaacttccgtcaggtttagtttttgcagtcatgattgagtttccatattcagcgttatcaacacctttagcttgagctttgatatcaaaagcaacattattaatagactgtttatctgcttctgctttagcttttagagcttgattataaagtgctaatttagcttgatagtctttttgtaactgtgcgttagtcgcatctgctttagcttgtgcatctttattacgttgacgtacacctgcattataagcttcaactgatttgattttcgctaatttagcttgataatctttttgtaattgtgcattagtcgcatctgctttagcttgtgcatctttgttttcagcatcaatttttgctttagtttgtgcatttaactgacttacacgttgagactctgctttgttttctgcgtcaatttttgcattttcagcagtagcatctttaatagcttgtgtattagcttgtgcttttgcagtaacatctttaactgtttgtgtttgattagctaaatcagcttgtgcatcagtagttgtcgcatgattaactgcagctgtggttgtaacagctacagctgcttttttagctgtagctactgctttatcaagttgagttgatgttactgtttctgcttgattttgcgttactgtttgagttgttgcttgagttgtaacttgatcagcagacacttgactagtctgtaatgtcgtgatcattcacttcataccaattgaaagtatcgtataacatagctttattgaaagcacttgaattaaatcgtggcttacgctttttatggagcttctcattgaaaaggattttggctcgtaaggcatcaaacgagtaacctctacccattcgctctacctgcctaataatgctgttaattgactccgtataagcattagtgagccttttatcaaagtagttgaatatttcaacatgccagttgtctacggctctcacgaggtctttatatgcgtctttagagttgctggacatacaacggtgtctccattgactataacgaagatgaccttcatctggatcaggagtatcccatatccagtaaaactcttctttgagttcataggcttcttttaaagcaggaagattacctaaccaagtatctaagaggaatgattcacgttcatttagatcgtgtttacgctttagaaggataaacctttcacgcataagggtacgtctttctttttggctcatatgggctttcaaagactttctgacgttatctaaggcttgattagccattctaactacatgaaacttatctacgacaactttagcttgtggaaggatagtgttcactgcgtctttgtagggcttccacatatccattgtgacgtactcaatgtaagtcctgtcactgatttctgaaagacgttggatgactgtttccttgttacggttaggcttgatgtcataaatagtcctgcgttcaatattagtcaatacaagccgaggtctacggataatatgtatctcgtctatcccaagccacttaggagtttcaaactggtattcacgttctttgagtgccacatagtccttaaaaacgttcctaatggttttctcgtcaacaccaacgctttctgcgacttctacaaaggtcttagacatggattgctcttgaatggactttaaaagccttttggtcatactacgcttttcatctacagatatggtagatccgcattcacgacacttgtatcgtctacggttcaaatgtaagcccactcgctttaaacgaatgggcaaatccataattagttgatttcttgaactgtgtttgtacaacttgtcaaaaccacattcaggacaacgttcaggtggtccgactgcttcaactttaaacatcatatcggtttcattttcttgtggcggttctattgttttaatgtctggtagggataataagtctgacatattattcatcctttattactctgcggtgttaaggtatcaattatagatttgatgtcgaaatcatcagtgttaaattatttttgtgaccacaaatgcacttagaaaatcccttaaagcattagctggttcacttgaatagggagttgtaaaaaagttcccttagcctgcacaacaagataatttcgaaatatctttatcgaacgtaagtgcaactaattttagcccttcagccattgttaaatatggtgctagggtttctgttaaatcttctatcgttaagccaaatttaacagctaatgatgctgcatagatgacatctcctgcattttcagatacaatatgaacccctaatacttttagtgtttctgcatctgctactagtttaaatacaccggttgtttcacggtttacaattgctcttggaacagcacctaaaggtaatacagatgtcttcacatcataccctttctcttttgcttgttcttctgttaaaccaaccgttgcaaccgtcggattcgtaaacgtaacagcaggaactaccgataaatctatttttttgtttaatccaccaatagcattatcagtaataattccaccttcataggctgctacatatacaaattgtggtcctaaagtcacatctcctgctgcataaatcttttcattacttgtttgaccaaaatcattgatcaggatttcattattttttccagtttcaacacctgctgcacttaaatttaaagaatccgtatttggttttcttccagtggcaacaagtaactgatctgattcaatgacttctctactgccatttactgttacgtaaaccctttttatctctccactttgttcaacacgctcaaaagttgcccctttgacaaggtttataccctgttcaattaacgctttttcaactgactctgaaatctcaggatcatactcctttaaaagtcgctcacttctttgcataagcgttatttctgaacctaaatgatgaaatagttgtccaagctccattccaatgtatcctgaaccaattacagttaatcgttttggtattttctttaactcaagaagtgttgtactagttaaatagtccattttttcaagtcctgaaatttggggcaacgaaggcgatgcacctgttgcaattaaaaagcgttttgcagataactttgtcccattgacctcaaccgtactagcatcaacgaattttgcttcacctttaattaaatcaaaattatattcatcaattaaatccatatatttttgattccgaagttcgctcaccaatttatccttttgcgtgattaaactagctaaatccacttctccagcggatgtttgtaaacctataaacggattgtcttttgataaatgattgatttcccctgccctaagaagagtttttgacggaacacagccaatattcacacaggttcccccaaccgttccacgctcaatcattccaacttttgcaccgtattctatagctttaattgccgaagaaaaggcagcagcaccagaaccaataataagaaggtcataattgtcttcattaattaacgccacgttttctagtgatgatacttcttcaatttctccggcttggtaatttgcttcatcaatcgcctttattgcactttcaacctcaatatcatcgggcagttcaaatactgcttcaccacgacgataactagactcaatatttttagcacctatcttttcaagtgctgattctacgtgtttttcacaacccgtacaagtcattcctgaaatgtttaccttaaatttattcataaaaaagctcctttcgttaattaatctctcatgttaatgtttctattattggacacgaatgtaatttcttttcatctggacatcgttgttttaagtcgtctaacatagtttcaattcgttttaaatcctctatttgtttttgcacttccttttgttttttagaaacaaattcgaacatatcttgacaacgaacttcatctttatctacaacaccaagtaatttataaatctcgcttaaagagaaaccaagttcctgtattcgtttaataaacccaacacgcttaacgtcatcatatgaatatatccgataaccagcttccgttcggtgaggttcttgtaataaattttttcgctcgtaatatctgatcgtttctttattaactccacatttatctgcaaactcactaatgcgataaatcatcttatttcaccccctgaatattataaaccatgtaccatagtacacggtcaagtaaattggactattttatttttttcccaaagtatcactcgtatgtgattgatacttttatataatactattgattatcctaacatcccaccagaaaatccgatttaaacaccagttgtttttaaactattaagaaagtaattccactatatattccgaagaccctttaaatttaagttaatctaaatatttctgaactttcatgctaatcaattaaatttcatacgtgtttcttatttaatcttacctcaacaaaataaattttattaaaatatataaaaagcagactatgttatattttccatatttaaagtgttaaaagcccaacagtataaatgtcgattcttctaaaaatataagtagttgttatcttttgatttcattatacctttactattctatttaaatttgttcggtttcagtcacaccataaaattaactttttaaataagattttatttcggtatcaacataaacactttatagcgatctgaaaaaagagtaagattctgattcccttaaacttttattcctgataagagaattctttatttttaaaattaaacattgaaaaatttttatcattgtactaaaattaggtgtggttaatatattatttaaccatactatttcaatggaaaggtttatagttcaatgaatctacaaaaaaatgataaaacaaatagttttatccattatgcaaacggtccttccctagaagaaataaatgggacaattgaagttcctaaagatttgagcttttttaaaactttactagcttattctggaccgggtgcacttgttgctgttggttatatggatcctggaaattggtccacttccataactggcggtcaaaattttcaatatttactaatttcaattatcttaatgtctagtttaattgctatgctacttcaatacatgtcagctaagctaggtattgttactcagatggatcttgctcaagctatccgagcaaggaccagtaaacagttgggaattgtcttatggattctcactgagcttgctataatggcaacagatattgctgaagttattggtggggctattgcactttatttactgtttcatattccacttgcgattgctgttttcattacagtatttgatgtattactcttattattgttgacaaaaataggatttcgaaaaattgaagctctagtagttgctttaatattggttattttcttagtttttgcatatcaagtggctctttctcatcctatatggacggatatttttaaaggtttagtacctacatctgaagctttctcaacctctcatacagtaaatggacaaacaccactttcaggtgccttaggcattattggggcaactgttatgccacataatctttatctacattcttcagttgttcaaagtcgaaaactagatcataataacaaaaaagatatcgctagagcaattaggttttcaacttttgattcaaatattcaattaacagtagccttttttgttaattcactattactcattatgggcgttgctgttttcaaaacaggaagtgttactgatccatcattctttggtctatttaaagcactatctaattctactattatgagtaattctattttagctcatatagcaagttcaggtattttatcacttttatttgcaatagctttattagcatctggacagaattcaactattactggaacattaacaggtcaaattattatggaaggatttattcatatgaaagttccaatttggttccgtcgtatcattactcgcctaatttctgttattcctgtaatgatttgtgtcttagtaactagtggtagaagtactgttgaagaacatatagctattaataacttaatgaataactctcaagtcttcttagcatttgcattaccattctcaatgttacctctactaatatttactaatagtaaagttgaaatggatgatgattttaaaaatacttggataattaagattcttggttggctttcagttataggattaatttatctcaatatgaagggattgccaaatcaaattgaaggtttttggggagataacccaactcatcaacaaattattcttgcgcatcaaatagctcatatcatcattattagtgtaatactaactttaatatggactattgttgaattgtataaaggaaataaaaaatacagtacgatgcaacaaagtgcaacttaatttagtaaactaggtagcctcaagtaaagataaaagtagtagaataattctactacttttattgatattattttttaagaagtcaattataacattgaaaagaactcaacataaggagttgctatctattttgataatattattgatatgtataaaaaatcttgttgtaacctaaaatatttagagatcattagatacagccttagtggctggtgctaactggactcagaatttattcttagagataaaaatgtatgtacatattcccatattctagataacttatactaaaaaatttttattctagaatataaaaattactttaatcttttttaaaacccaaaatgacaaatcccttgattttactagatatttttatttagaaattaaatttaaattactttaattactaatagggacatctaactcaacaaaaaaagccctagggatggggcttttagtgttccttgaagtggattcgttgcgattttaaatgaaatttttgataacctcaaattcctctttttaatgcaaagttatttataaaggctagcttatcataggaggttacattccatttaataaccatcttctatttgataagcacactatcaaaaaactaattacactaaggcatatcatataaggaacaattataaaaaagtcggttaaatcaatagtcatcggatgtgagaaaagtttccctattattttatagagagaatttgaagcatcaaaaatagcagatactttaaaaattcctccaattgccactaaaataatggatgtaatccaataaaaaatagtaactccaatagaaactagcatattagaaaacaggatactaatagttgagacgactagtagatactgtagaacaacgagtgaaaataagattgtagttgttaaaaaataaaatagtgaatatccccaaagcaatgaagctaatatattgcaaactattatagcaataaaaaattctgaaaataatactaacagtttagtataaaagtatttagttagatgataccctgaaaaatagtgatataaaatacatttgtcagagtaatctttattaaagaaatatacaatgacaaagccgaatattaaaaatccaaattgggtaaatactgtgtaggtactaaagtaaaattctcccaaagttaaatgtcttattttatctatccctactggtaaaatatatcctaatacataggtcaaagctacagtagatataatataaaataatgttctacctcttatagactttctaaactccaatcctaacattttttattctcctaaataccaactaatagcatcatctaatgtgtctactttacaaattttttgattatcaattagaaaatagtttccctttaaagacctgatattattgatatcatgtgaaatattaataataattttttcgggataatactgaatatagttttgcaaaaatacgtttatctcatcaacagactttttatctaaagcattagtaatttcatcaagtataataatatgcttgtctaaagacaacaaaactaataatttcaccttttgtttctgcccatcacttaattgctttaacttaaccgttttacttatttgattaatattcaataactgataaatttctttagaaagcttccacggaattgtcctttctaaatcgttaatggtaacatcactaggaagattagaataactcgaaataatcagcgtgtcttcataaatatcatttgaaaaataattccctctatttatgataaaatctttagctagttgagatttacctgatccattcctacctaaaagatgatttatttccccttcttcaaagtctaagttagtattctctaaaagtattctatttcctatttttaaggtgtaattattaataaacatagctactccaatttacttatttcagacagcaacctatccataaagattaaactctaattaatgggctgaaccagcaacccatctattttttgaatttcttacaaaataccataaatcgtttacattgtctaatttatttttcttagttagaacttttgcaaagctcatatcatttagaattggttttacttctctctgaatatttttatttcaatagtcaaattactttatataacaactaaaaatatatttaaaaataaatttttggagatttttttaattttgaaaatcaactaagattaatatattcatcttttatgtaatattcaaatacatttgagtactctaaaaaaggtatatcttgtatttcttcaataacttatttttgttctagatttgttctagaaaatttatctttctttattaatttttataaacaaaaagtgataaattccttgatattacttgttttctttttttatacattaactttaaatacatatagttactttgtaggggcattaaactacataagaaaaagcctttatttaaaggcttttttgcttgacagaagaggatttgtcccatcatttgtccccaaaattatttattatttttcttgaaaatctttatgaatggtaattgagtttagacaatcacagcctattatcctttacacaataatattagttgaaattttgatatgaatttgacaaaaagatattcataaatttcattgctgattggtattctccttggttcagattaagtttcctattaatagaaatatatttcgccatttgatttgtttcatccaataaaaatcgcaaattagcctcaatgtcttttaaagatttatttgaaaaaattttcaatagttgatctttatctgtaatatattgcaagatatccttgtcgagctttccaaaagataatgaatcaagctctttttctattaatattttttgttttagaagtttaataaaagcatttttaataggattagatatcataaactctgaataaataatatcatttcttgctatccccttgactacataagtactaacccaatatatttcattaagaattttgttgatttcatcttctgacaattgctttgtttcgtacagagaacttctttcaaaattataatcaagatatttattctttttatctaaaagtacttttgaaaaagcatcatctaaataatcctccaagaattctggtttaataagtcttaaatcaatcctcgtcagatcttgaaactgcattaagtaagcaaagcaattgtattccgtcttatttctaaactcatttggtttctgcattataagaatatcaccgaattttttatgataattagtgtcagaaataatatcttctataaaattagtaacaaaaacaatatcataatcttgaaaatcatctttcggtacatttgggttagcccgagatccattcaatagtacagcttcgattctcttatcttggtttgctatgtttaacaccaaattatatatttcttgctcatctctcataatggctacctcctacttcactttatattaccatgttttttctaatacctttatattacccttgtatttttctctaagcatgtaatcatagacttaaattagcatggacatacctttacgacctccaaggattcaattttaaatttttcttaacaactgattatgattccaaatattttcaaccgtttaatgttagtatgtcatcagttatcatcactctttttatgatagttaagatttttaaactatcatcttttgaaaaacatttcatcttgactatttctgttaataaatcagctccatgagcaaaggcatgtatccatccaagctcctcgtcaaagcctctaaaatcaggttcatctataagccaggagaatgcctgattcataatttttatctgatcttcttcagatatccaacttttattatttgagtcctccaataataaagctagtaatagagcagtaaaagatctgtttaacacagtattactgttgggtactcctaatccttgtaaaagaaatttatcccttaaaactctctgaaggacatttaatttctggctttgcatcagtttatgttctattactaatttaacccaagacccatatactatttcatctcgaactcttgggttccaatctcctatatgatgtaatcaaaaagataaaacatcctcatcaattggataattattttctatctttttgattacatcacttgcttccatgtttctccttgcatgactttatattttatattttccaaagtgtaacatttgagttttcgttttcactttaaaatgattatagtaactttaattttttacttggatactcacttttatatcagaaatttttagtacttattctttgactctaggaataaagcgaaggcctaccttgtaacctctattaggaaaaaattgaggcatactataaatatacgatagaactaaaattaccagagaatatagaaagtataaaaatctaaaatacttctgctttaatttataatttccttgggttttacagctcgtgtaatatagtatattccagaaattaaaaagtaaaacataggtaatattcttaataaggcaaatggtgtttcaaataagaatgctaaccaaaatattttcccttgcatttcccatagaccttgcgtcagataccaactttttggatcaaatatggtgatagaagttgttcttatcaagagaaagaaataaaataaagagaaaaacgcatgctcacaagtatatttataataactcatagccatcgctgattttgattcttgatcagaaaaaatctctgaactggtttcaggctttattttttgaaaataatgcagccctccccaacgactaccgctaatatgcttccatccactgtcctcaaataaagtgatatagttagcatagtcatctttcgacatgtattttttaaaatccatttttattgacatcttgtctttttctttatctctcttaaaataatagaaggctggaagaaatgagttaatgcctgtaaaagcatagccacttttttgaaccttatcgatccattcttcctctttttctgtggatttaaaaaataatttaaactttatcataactatctcccccaaaacccaactgattagcagtattaagtaactttcttaatcgattcgtttcaagttctactatttcttttcctgtctcagtaataatataaacttttcttcttctatcgtcacttgggatagactttatccatttttgtttaagtaaattttcaatggcaccgtacattgtccctgcggctattctaacatcaccgccactcatttcttcaactttttgcataatagcatagccatgtgcttcctcaaacaaagctaataagatataataggtagtttctgttaacggtaaatgtttattccttttcatcaattttctttctatacagttaaactttatatagttattctatacaatacaactatataagtcaactgtatatttaaacttattaaaaagaaaagaacagatagcctatccaattattcgtttggagttttttattttagtcgtaacttctcaaaagtactatagttttttataatctattgactatagtactgttgtttattcatctcatcctgatcttaatacctttaattatgacttcttatccaatctatacagttaaaatacctcctcataaacacaatagtttttaaaattaataatagagactagagttcatcactctggcctctattattttttattcaatttatatccattgatttatttcttatgatattacttgaataagctaccataaccaatgataacagtaatcctaaaaatttctttttctatattctacaaccacttttccaatgtattatctaaaataatcgttatttgggtttattcatctgtttgactagtttttttcacaattaatcaagaagttttacatatatccttgaatctctatctggaaaaatgtagtctacatctagttcatctcttgttatttgcttaaatccttgattttcataaaagaagtgagatcttttctctttttctggagtatccaagacaattcttgtgaatttactagctcgagcaaaaagcataaatctttcaaataattttcgaccaagtcgaacaggatttcctctatattttggatatgtaaaaaatttttttagaacagctgttttatcatcaatacgcagtaacgcaatcgaaccaactactttttcattttctaaggcaatccaaaattgaccttttctgttttgataataattttctatttgaaaaatatcgtcttgttcagccatctttatatcaagtttagcttctatattctgacaataattaattaaatctactagctgtgctaaatggtacggattattctcgtattctttaatttccataatatatttccttattttgactttaaagtatatttctgcaatgaggtatgcataggatatcatattagttggaaatattgatctagataagtcaaatagcagcaaagctcttaattcggttttattttttcaaaaagtagctatcgccttattgatatcttatcaaaattaaacttcacttttttcaaaaatgtacatgctaagtaataacgtcattataataagcaaaaacactaatatgctcggttccattaagtcttgaactttaaactttccacttaatatttctccttgtttttggataagaagcataggattatagcttttactgattttaaaaaatccagatactacacataacaccaccataaaaagacaacctaacaaaccccctaaagttttacgaaaaagaactgaaaaaaagagtattaagcttatgaaaagaataccgataaaccatgttgcaccgtaaaccattaatttatgacttccttcgttactaaagtaatataacgtataactaaaatggatgacaacacttaataagtatgacactgtccatagaagggtaattactataaatttagcaaggattataacttttttggctaatcccttcgtaactagattaattaaggttccttttgaaaattcttgcgtcagtgtactactaaataaaaatactaaaataactaaaccaagctgattcatatttttaaaatactgaatataagaatcaatataggtaggctctggtatcgctccctgtagttttttaggtaaaattcctgccataatatcaggcatcataagtgcagttaagggacctaatataccaaatattgaacaagtaatcagaatagatataactttgtatgtcctaacattctccatccattctttttttaacattactgctaaagatttcatttggtaacctccaaataaagctcctctaaactattgtcaatgacttcaatagctgatgggctaatctttaaagaaactaaatcttggtaaaaaccagctagtaaatctgctttgttatccattttagagcctttgagagtcagtgcatactcattatctttcttttctatctgatagttatgagatagtaccttagcttcagactttgtcacttttattaaaatacgaaccgaataattttcctctgatttttttccttttaactcttcaagagaataaatcccacacttagttaacaccagaacatgatcacatattttttcgacatcagagagaatatgggtagaaaaaatcacagttttttctcctctaagatttgaaataatatctaaaatatcttggcgacctttcgggtctaatgcagaggttggttcatcgcaaataataattttaggatcatgaaccagtgcttgggctaatccaagacgctgtttcattcctcgagaataagtagcaatcttttggtgattatcgtcaagtccaactgacctaagtagttctttgttagaaagcttatgctttgatctcgctaaaccagaacataaatcaagatattctagagctgtcatataatcgtagtactcgggaacatctgggagatagccaatcagttgattggtatctgttcttccaaaattaacttttttaccaaaaattgttatgaaacccgtatcaaattttaacaatcctaaaatcatttttattgtcgttgttttacctgctccatttggtcctacgaatccataaatcatattttcttctaaatcaaaagaaacattatttaatatttttttaggaccaaaagattttgtaacgttttgaaatgagatagctttcattcattattcccttccaaaataagaaatgcaattggcccaattatattaagaaatataatgaccaaaaaccaaactggctttgaaaggtgtttagtcatcttaagtttacttagtttgactagagaaatgataattaaagctccttgcaacataatcaacggaactaggaatggtaataattgatttggtatttctgtattcatattagtaatccttttttaaatcgttaagtttttgaatcatttgttgaaattctttatgccctgatagttctttaaattgtgaattttgaaataagtcctcaactcgttctattacctgtaattgactcgtcggtggtgcaataccagtaggtattgtctctaaccaatcatcgatggtataaaagaaagtatcaccgtgtaattcaaatctttggagcaattgttttaaagatttaaaacattgttttaagtatcctaatgccttatcatcatcacttttactataatgacaagctaaactataataacacttgatgactgtgttgggatgcaaagagtttaattgaaacgcttctatcatatgttcaagcctttcaaaaatatcgcctttgttttcttcaacttcaaaagttgataaactcaatagatactcgcatacaagtagaatctgctgataaatttcaacctgtaatacttgcttagctcggtaaacatcgacttttgcaaaaaagctattagctaaaagtaattcttcacctaatttatagggactattctggtaaaggtttatcacttcatcatattcaaggttgtgaaaaagaacgaccgttttgaacattatcgccgtctggaggtcagactcaactactgttttactaataattttatttagtgtacttagtgaccactctttcatttctgaatcattaaggttggttaggttgctcaagaccatattaatcattatcaacagagtcttaaaatcgttagggaactgttttgataattccttaacttcctgaaagaaatctctctcagacaatacatttgcttttatttttagatccttaatgagctgatttctttgatcatctgacaatgttttttgataaccgactaagtcatccaagctaatatcaaaaagattagccatcaaaataagatagtcaatatccggtttagcttgattattttcccactttgaaattgtagtttttgttaaatgcagataatcactcaaattctcttgcgtcataccaatctgagtacgttgtaaatagatattctctccaagcatcggtcaatctactttcacgtccattatagagtttctaaatcaaaaataaaagttcctatcaggaaatataatataaaaaagtttccctagaagaaactttttcgttgattaataagtggcaaaacagcattaataataacaatggttaaataaaaattaacttcactaatatttgtcattgaaaaataatgaattataaaagagcccttaagaaaggctcttttataattcattggtaactactatttttattgtaactctttcaaagatacaatagcagacaaaccataatatgacgatgctcctagtaacaacgaccctaaaatatccgttaaaaaatgattttctaaatagagtcttgaaaaaataactgatgcaaggatcactaatgcaaatattacgaaaactacttgtgacaatactcttctcaatctctgtctcgcaaccactaaaacaagaatcattaataaaaacgctgatatcgtatgtccactgggaaaactataacccgaatcaaaaacaagttgattcataggtctatgacgtgcgatgatatcttttaaaagcaatgccaaagcattggtaccaaaaaataacataaatagccacacagctattctttggtttaaaaaatattgatacccaaggataacaagtgctattaatgacgttgtcaaagggctgacaactgttgatattatcgtcattaagttagttaaatcgggatttcgtatgctttgaaaaaaagctgaagtgatattatccaaataacttatcatatcactttgagatttaactgctaatgttaacactaaaaaagaaacaagtagtataacacactggaaaaaggatttcttgttcactacataacctcactttaataaagagataaatcttcatacattatggtttaaaatatttaaaaaatgcttaaagtacgcgctaaccttttaggtttaaatatgactattcacaaactagaagaaataccaaatacgaacttttcctattaattagcgttcaaattttcattaataaagcaatattgctacaatatacttgaaacggagggaataatggatattacagattatcaaaaatgggtgagtgaattctataaaaaaagaaactggtatcaatacaattcttttattagaagtaactttctttcagaagaagtcggcgaattggctcaagccattcgcaaatatgaaattggacgtgacagacctgacgaaaccgaacaaactgatttggaaaacttaaatgatataaaagaagaactaggagatgtcttagataatatcttcatacttgctgatcagtataatatctcactagaagagattatcagcgcacatcgcactaattagaaaagaggtttgaaacatgagaataactattttttgtggagcaagtactggggaaaatcctgtttatagtgaaaaaacagttgccttagcacaatggatggcacaaaacaaacattctctggtgtatggtggaggaaaagttggcttaatgggagtcatggctgatactgtgattgcaaatggtggctacactactggtgttattccgacatttttaagagatcgtgaaattgcacatgaaaatttatcagagcttatcatagtaaataatatgcctgaacgtaaggcaaaaatgatgctacttggagatgcctttatcgctctacctggtggacctggtacccttgaagaaatttccgaagttatctcttggtctcgcatcggtcaaaatgataatccttgcattttatataatgttaatggctactttaatgatttaaaaaatatgtttgatcatatggttggtgagggttttcttagtctggaagatagagaaaatgtcctattctcagatgatattactgaaatcgaagattttataacgaattataaagtccctagcacgcgccaatactagattgataaaaaaaggaagtttctaattgaaatttccttcttttttcgaagcgattacccttggttcatttttctttcagctggtcaagcccatcctctcaatatccaaactcatcctttctgctcgagaacttataaatttttaggtaatctttagagaagccaaaactatagtcttgtctatgtattttatcttattagaagtatccaagtgctcgtccctattgactaatgacttagaaacctatacattatacattataatatttctttgtcgttaccgttattaataaggaggtaatcaattgaatcaagaaaaaaagagacttaacctaatcgggctgatacttttagctcaggctattgttttaagtttggcgactacactatttgctgaaatcttacaaaatgatgtctggataggtatagcaagtactttaatcgccttactcattccttgtttttttatgggttttaaaaatttaaaaaaacatctaacggcaacccatcatacaatcactttcaccactattttattcttgttaagcattatatatactactaataatatagtctccacaatatgggatgttgtgctaaatcatctcaatattatggaatcggaaagtcaaaattatgatgccacattcaatatacttatgattagttattctgttgttgtaggtcctttttttgaagaagttttataccgaggaatagtattgaatttattatccaagtatggtaaatggtttgccattatcacttctggcatcctatttggtttaatgcaccaagacatttctcagctattgactacatctattgcgggtatcataatgggttttatcgcttaccattattcctttaaggtagccctactccttcatatctgcaataactttatcgtagaaattttcacccagctatcaacagtaaacgagttatacgggacttattttgaaaatatattgctaattttagcaatcttatttatattatattacctttttactcataggaatactgctcgccgtcgtataagtctgcactctaacgttcgagaggctgactcaataaactctaaacaacatacaaaattattacttactagttggccttttattctccttgtcatttacgacattgtcctaacaactattaattaagaccaagccacaagacacaaaaagtatggttttgaaaaggataatcatcctccttttcaaaacacatacttttctttatgtttactaaaaggtcattaatagtgagataatgtcaatttttttattatcaaatatggtagactacacaggacatatttacacttctagatttcctctccacgcttctgtgccgccatctacattgattactttgtagcctttcaactcaagaaattggcatgctctaatagatcttccccctcgttgacaaacaagataatattccttatttttatctaactgttcaaacttatgactgagttgactcaaaggaagatttatcgcacctgaaatatgccccccacgatactcatgctcttcacgaacgtctatcaaatggatattattatgctgggcaatcaatgtttctaatgctacaacagttatctttttagtcataatctttatttcctttgatacttggcaaatttagtcaaatgactaatcactttattatttaaaatggtgacatcgttctactattatgactattatcgtaaaccttttaatcataaaaaccatggtagtacaaaatcacgaagtcgacagcatcacacgaaaaatacaaatattattttaatgctgtttgaagtgctgcttgtaatgttacaatctcttgatcaacttgttgtaccgtaacatttggattcaactgaactccaacagcatgtgtgattgctttatttaaagtattgtaaactttaaattctttgacgttaagtacttttttatctctagtaaagcgtgtattccagatttccttatcaagttttgattttgtatagattgtagctctatcagttggttttaaatcaggataagttaaaaccttttgttctaatgcctttacatcgttaacttgagctttaattgaatcaactgaagcaaatggatctaaaatgcgaataaccagcttagttatcccaaatcccatatcaatatttgcttgactaaccttatttgctaaatgttgagttgaaaaagtgattgcttcaatcacatctgttaaggcttctacacgactaccaatagaattcaaatcataaactgtctcagggttggcacgcaatgaagtctttaatttttcaacactagtaatagcctcattaaccgttttttcataatctgttccctgaacattatctttgatatttctcaactgaatgctatcttgatcaagcttttgagccatttgctgggcttgattattactgtttacatgatttaccacttgtggagttgtcacttgatcagcatgtacttctaatacagctggtgaaaataacaatgcaccagccactagagttccagatagatacatcatatgtttaacgttcataatgaatttcctcctttaaactaaaatcacttttactgcagtatttttaatttacagggcccatgtttgtatcttactacttgtccaaaaggtcgtcaagcgctttcttttcccctatattttacattattacaaataaactgcatttttttcataaaactaatattatcattttgctataatatacttgcgcctatccttttgttaatttctgataatttaatttatattttcatgtaaaaaaccataacgataatttaccaccttatataaatctaaatattttagaaaatttctacttatcactatttttatcaaatagattagcctaatgtttttcttaaaaaataaatttaataagaagcgtactattttagataaaatcgttccattatgcccaaaaaccatactaaaactcattatttttactttctgtttagaaattcatactagaccaagtattttagacacttaaaaagccttaaacataataagttcaagactttttattacttagtattttaaactgtgagtttgtttggcagttccctccgatgatttttaccccaattttttgaaccaaaagttaacaatatcgtcagccatagtattgatatctagattacatttactggtaactatgttaccatgtgtatggataacttatatcaaaaatatattaatctaaaaaagtgaataacccttataaaataagtaaatcctaagtacagcattaacttcaagtaaacaatttaacggaggtagtatatgaaaatagcaataatcggatatagtgggtcgggtaagtccactttagcaagaaaattgggaaattactataattgcaatgtattacatcttgatagtattcacttcgccccaaattgggaagagagaaaatatgatgacatgattgacgatgtcagcaacatgttagaaaaaagaacatggattatagaaggtaactacaaaaaactgctatatcaagaacgtctagcagatgcagatgagattattttttttgactttaatcgcttcaactgcttgtggagagcattcaaacgttactgtaagtttcgtggtaagactagacctgatatggccaatggatgcccggaaaaattagattttgaatttatcagttggattcttaaagacggtcgctctgacaaacaaaaatcaaactataaacaagttgttgaggactaccctcaaaaaataaagattctaaaacaccaacgcgatcttgatcaatacctaaaagaactccctgttgcatccaatacagaccctctcaagagcttgtaattattatactgacagtatttactcgtatatctcgctttaccttttctattcttattcttgaaaattaaattgtttttcatgttccaattttctgaatattctgctataatatgataatcacttggtcaagagacaaaaaactattcacttttagaaaatagctgtctctaatcgacctttggaatagaggaggacactgaatgacaacaaatgtaatggcaaattatagctacggagaagattgcttcaaagaaattcctagcgttttggcaacttaccgtattcaaagcattgctttcgtcggtggcaaacgtgccctagacagctcagaagccgaggttcgctctattttagaggaagcaaatattaaagtcacaggaagctttgtctatggaacggattcaacacaatctaacattgacaagttagtagccaacccacaagttcaagccgctgatgctatcttaggttttggcggtggaaaagctttagacacagctaaaatggtagcaaaagagttaggtaaaaatagctttactatcccaactatttgttctaattgctccgcaggtactgccattgcagttgtatataatgatgaccattctttcttaagatacggctatcccgagtctccacttcatatttttatcaatacacggattattgcacaggcaccaagcaaatatttttgggctggtattggggacggtatttcaaaagcccctgaagtagaacgtgctaccttagaggctaagaccaataaactaccacatactgcagtgttaggacaagcagtcgctctgtcttcaaaggaagctttttatcaatttggtgaacaaggtctaaaagatgttgaagctaatttagcttcgcgtgcagttgaagaaattgcgcttgatatcttaatctcaactggctatgcttctaatttagttaatcaacctgatttctactacaattcttgtcacgcgcatgcattttactatggtacaaccgctattcaaagacaaggtgaattcttacatggcgttgtagttgcgtttggtgtgttagttttacatgcttatttcaacgaactagaagaacttgaaaaagtagctcgttttaataagtcactaggtttgccaacaactctagctgacgtctctttatcagaaaaagatattccaaaaattgttgaaattgcaatgactactaatgaatacaaaaatacccctttcgatcccaaaatgtttgctcaagctattttagcagcagacgctttcggacagacactagcctaataattcaccaactcgattattccgatacaaaaatcccttagacacatcatctaaggggtttttgttattaataaagtaaaaatactgctctccattataggaagttgcagtattaatttaaattcttagtattgtatcagtatttttaaataactgctaaaagattatttttgtagttgtttcaattgtgctaactgatttcccaatgatactagcatttctgtctgtaacttttgaatctctaacaattcaaactgatcttgttgtaccatatgatcaatcttttcgtgcaataatctaatttctaactcagaggttttattgacattaaagtcatttcgagcttgcaaacgatcataatcagcagcacgattttgactcatcataataagtggtgcttggattgcagcaatcgttgataaagctaagtttaacaggataaatgggtaaggatcaaattgaataccaaaaggcttcatgatattaaccaacatccaaatagccataatggatacaaaaacgataataaaagtccaagatccgccaaaacgtgcaacatcatcagcaattcgttgaccgatagttgcttgcttgttcaaacgctcttcaacgttgaagggcttctcttcttctttcatcaaggtagtcacattatattttatcttctcatttttctgattcgctcgctgaacaatttcgtcaagataattcatacaataatgacttaaatttccatacgaaataaagtcactatccagagcaaaaggataacgtgctcttattaaacctttaatgcctaagtctaaatcggaaacaaataggccttctgcttcactataaactttttgatcaataaaatcgacacataccatttttatacctccctttctcaaccaagatttattcaatatttgaatacggtcaagctagccaacaggctataggcttttggtactatataagtgagtatttgatacacccctattaagctttacagcgttatttcgttagtctaaaaaaatcgctgacatccatattatgccttaattttatgctacccatcaaaataacgctttattctaagtctataaacttaaagaaaacttaaattaactaatttatcttagtatagaaggtggcttaaaaatctagtttaacctctgttttggtacgtaacttttattataataataaacgaccaactaaaaagtaagaaagttaagaggactttcttacttgctttttttgtatatagtcaattaactcaagagtcagatcatagcgtaaaaagggagtaatcaaatagataccattaaaatagttcaaggcttcatcaatcaaggacttactctcgtttaaggccaaagttaaacaagcttctttgtcgtcctttaccttttcaagagcagataaaaatgactcagaaagtttaataccaggaacttcattgtgtagaaaaacagcgttattataacttgttattggcataattccgataaaaaagggttgttcaactgttttagtaagatcagctaattcctttaacacagagtgatcaaatattggttgtgtcataaaataatcagcaccagaagctacttttttctcaatcaattttacggttcgagtaaggtttttcacattaggattaaaggcagcagcaactgtaaaatctgttggacgtctcaagctagcaccactataagataaaccttgattaagttgtttaatcagagaaaggagtttaaaggaagtcacatcataaacactagtcgctcctgggaaatcaccaagtttagtcggatctcctgttatggctaaaatatggttaaaacctaataattccatgcccaacagtctagactgtaaaccaattaaattatggtcacgacaagctatatgtagtaaaaagggtgtgctaatttcatctttaagcaagctagctatacttaaattacaaatacgtgtattagatagtgaattatctgctaaagtaattgctgcaatacctttttggtcaatcgctcgtatagccttttgaaactgaacgatatctaaatgctttggaggatctaattctgcgataattgttacttctttttttaccttatccactagagtatctgttcgtctgatacgcctaacaaaatcttttacaggtattataggagtaacaacctttcgttcaataggtttcaatcctctaatagatcgtttcacagctctaatatgatctggagttgtcccacaacaaccaccaataagcctaactccttctgctacgagaagttctgcagattttccaaaatactctgaattctgactaaactggtattgactattctcaccatctaaagataactgacttgcattaggataaactgacaaataagactgggcaaataaaggaacttgcttcaatgattggatcatatgatagggtccaaggtgacaatttaagccaatcacatctgcacctagcataactaattggctgagcgcctctacaataggctttccatttgatgttacccctgcttcatgaagagaaatattagtaataattggtagatcagtcatctccctcacaatttttaaaactgtcgttatctcctcaatatcataataagtttcaaacaataatccgtctagctgtcctgtcgccaataaagcctcaacttgttccaaagtttcttctacaatattatccaatgttaaatcgcattgtctttgagaacgaaaacctccaacagtacctaaaataaatgtttctttacccaaagtcgcttgatgagctatattaactgctgcttgattgatagagacaacctgatcttccaaaccgtagttctttaatcgatgacgttgagccccataggtattcgtctgaataacatctgcacccgcttcaatataagcttgatgaatggctagaaccttttctggatgtgttacattgtaggattcatgacaagtatctagcccataagtataaaggagagttcccattgcaccgtcagctactagaatatctgtttttaatttctctaaaaacttggacatcttctttactcctccctcatggcaatcctttactgattaacctattaattatctaattgctgacgaacctctttggtagctgaaacaagaacctccaaggcagcaattgtttctgcttcacggcgtgtttttaagccacaatcagggtttacccaaaattgctcttttgatagacattttagtgatcgttgaatattgacaataatttcttccttagtaggtatgcgaggggaatgaatatcataaacacccaggccaattcctagaggataaactgctgtttcaaaactttcaatgatgtccccatgacttctactcgtttcaatagaaataacatctgcatctagtgcacggatagaatcaataatttcgtcaaattttgaataacacatatgtgtatgaatttgtgtctcatctttcacagatgaagttgcaattttaaaggccgcaacagcatcatctaagtaagcctgttgcttttgctggcgtaagggtaaaccttctcgaagggctgcttcatccacttgtataatagcaatacctgattgttccaaaagttgaatctcatcttttatagccaaagcaatttgattaaaaagatcagatcggctaatatcatctcgctcaaatgaccagttcgttatagtaataggacctgtcaacatgcctttaacaggtttcttagtcaaactttgggcataaaccgtttcttcaaggcttaagggttgaatatgtttgacatcaccataaatgataggtggtttgaccgcccttgaaccataagactgtacccagcctaatttggttgtcgtaaaaccagctaacttttgaccaaaaaattcaaccatatcaacacgctcaaattcgccatgtactaacacatcaagatcaagatcttcttgaatagcaatccatcttctaatttcagtttttatgaaatctttataatctgagtcagatagatttcctcttttccaagcaaggcgtttcttcctaatttcaggtgattgaggaaaggatccaatagttgttgttggtaaaatcggtaactgtaatttttcagcttgcaaagcttggcgtaatttatacggacttcgttcaagctttacttctgctaatgattccaatgctacatgacgaaaatcagcagcttgaagagctgaaaaacgagataaagcttcgtgatatccctttgttttattaccatcaaaagcactagctaatagttctaattcctttagtttttcatcagcaaatgataagccattctttaacacagggtctaaatgtgtttcgtatttagtcgtcaccggtacatgtaaaagacttgaagaaggttgaagagtcaatcgtttaacaaagggacctatctcttccaataaagccaacgtttcttctaaatttactgcccagatatttcgaccattaacaattcctgcaaataattctttttcgcggaatagaccttgcttaacagcagctaaattttccgccctaccatgtataaaatcaaggccaaatcccgttactggcagcttagagagtttatctaaacagactgctgattcaaagtaggtttgaaagatgaagtgggcttgtggtacttctcttgcaaaaaaatcataaacagacttagctatatctactaaaagttcaccttcatcagttacaaatatcggctcatcaatctgaatataggtggcgcctgcatctatcagatcttgaaagacctgcttataaagtggtaataaccgctgaacagtcgcttcaaagtcgacaattcctgatgataaggaaacataggttattggaccagtgataaccggctttgctttatcaccaactacttccctagcttctagataaagatcaagtaagtaattattctgcaagtgaggtttagtctcaacctcccattctgggactatgtagtggtagttggtattaaaccactttttcatagatgatgcgacattatctttatcacctcttgcaatagcaaaataaaggtctaaattcctctcatactcatcgaaacgctttgggattacattgaattgaaatgacaaatccaaaacatgatcataacaagaaaaatcccccactggaataaggtcaatacctgcctctttttgtttctttaaatgattgatacgtaattgttttagttgtttttctaaatctttttgttcaagattccctgcccagaaagcttcgatcgcttgcttccattcgcgctgttcaccaagacgtggataccctaaatttgaaacttttaccataatttcctccatcaagttatagctaataactaacccttttagttttatgaattattttagtccatgaaaactataatatcaatagcttttaatattttatatttttagcgatttatatagttttaaactatataaaccactatggacctttttataaattttaaaacagcagcatgtagatatctttaaaaagcaatcttacaatcaactcatattatcaagatacagaaaaatctgttgatattattaacaattagtcaaactattacacatcggctatcaaaagttcctgtctagacaaaaacacaaaaaacgtatctagaaatagatgcgttttttgtgtttttattaatcttccattcctacacgttaaaatagtaatctcaataaagccatagtaacgataccagtaagaacagtgtaaaataaatttcgatatcgaatagtgacaactagagttggtatgccagccaataaatctaaccattttagtgttggcaattgtcctaatttaactgaaaaaaagctagagaatgttagggcaaataaaatagaaagaggaagaaattttaaaaatttcacaagactatttggtagccctttgtattttacaaatatgaatggagcgactcttggcacccaagaaacaacaaaacctaaaagaatagcaagaaaaacggtactatttatcatctaaaacaactcccacactacatccaacaacagtcgcaagcaatactgataaggctcctgacaaaaaagtagctaataagaagtaacttaaacctacagaagcaagaacatatacaacaagtcgctttccatcagataacatcccaaacaactgaaatacaaagagacctataaacatggcgactaatgcaaagtctaaaccaaacatttctggattaggaatagtactccccagtaaagttcctattatcgttgagattacccatgtcaaataactcatcacattattaccatgcatccaactaggcgatacaactttgtgatgtaatgcttctccaagtaaaacgccgtagctctcatctgttattagagttcctatggctaattgattcattaggtgagcagacttgaagatagtagtcgcgtgtaaactcattaacatatttctcaaattaactaaaaatactgtcatcgtaatagtcatcaagtctgcttttgctaataatagcgcacacatagcaaactgagcagatcccccatataccaaggcactcataagaccaacttctattgcagataaatctgatgctgaagcaactatcccaaacgccaagcctattgagatataccctaaagctgtgggcaaggcatctttcactccctctttaaatcctttttccatcatatccccctaaattttcagtatattcagttattatagcacaacggtgattactaagaaagaagaggaatgattatttatctttgccagcaattagactaataaatatcctgtaattattctataaacctttgatattgtagccatatagttggacaatattattattttcatagaatgatttttaaaaaatgctttaggtacggtcttaaatttaccacaaaataatttgtaatgaaaattcagaaaattgtagaaaattttgattttttatgttttaatagtttttgtaattattatgttacaagaaaaggagatttttatgaacacaaaacagcgtttttcaatccggaaatataagttaggtgccgtatctgtacttttgggaaccctattttttttaggtggtatcacaaatgtagctgctgattctgtcataaataagccatctgatattgcagttgaacagcaagtaaaagacagtccaacgagcatagcaaatgagacacctactaacaacacgtcatcagcccttgcgtcgacagctcaagacaatcttgttacaaaggctaataatagtccaacagaaacacaaccagtagctgagtctcactctcaagccaccgagacattttccccagtcgcaaatcaaccggttgaaagcactcaagaagtttctaaaactcctttaaccaaacaaaatttagcagtcaaatctacaccagctatttctaaagaaacccctcaaaacattgatagtaataaaattatcactgtccccaaagtatggaacacaggctacaaaggagagggaactgttgtagcaattattgactcaggactagatatcaatcacgatgctctccaattaaatgattcgacaaaagcaaaataccaaaacgaacagcaaatgaatgctgctaaagcaaaagctggtataaactatggaaaatggtataacaacaaagtaatctttggtcacaactatgttgatgtcaatacagagctaaaagaggtgaaaagcacttctcatggtatgcacgtaaccagtatcgcaacagctaatcctagcaagaaagatacaaatgaattaatctatggtgttgctcctgaagcacaagtaatgtttatgagagtcttctctgatgaaaaaagaggaactggaccagccctttatgttaaagctattgaagatgccgttaaactcggtgctgacagcattaatttaagtttaggtggagctaatgggtctttagttaatgccgatgaccgacttataaaagctttagagatggctagactcgctggcgtttctgttgttatagcagcaggtaacgacggtacatttgggagtggagcatcaaagccttctgctctttatcctgattatggtttagttggtagtccatcaacagctcgtgaggccatttctgtagcatcatataataatacaacactggttaataaagtcttcaacattatcggattagaaaacaacagaaatctcaacaacggattagctgcttatgcagatcctaaagttagtgataagacctttgaagtagggaaacaatatgattatgttttcgtaggaaaaggaaacgacaatgattataaggacaaaactttaaatggtaaaatcgccttaattgaacgtggagatattacttttacaaaaaaagtcgtcaatgctattaatcacggtgctgtgggagctattatctttaataacaaagctggggaagctaatctaacaatgagtttagatcctgaagcaagtgctattcctgctatttttacccaaaaagagtttggagatgttttagctaaaaacaactataaaattgtatttaacaatatcaaaaataaacaagccaaccctaatgcaggtgtcctatctgacttttcaagctgggggttaacagcagacggacaattaaaacctgacttatctgctcctggaggctctatttacgccgctatcaatgataatgaatatgatatgatgagtgggacaagtatggcttctccccatgtcgctggtgctactgctctagttaaacaatacttattgaaagaacatccagaacttaaaaaaggtgacattgaaagaactgtcaaataccttcttatgagtactgctaaagcacacctaaacaaagatacaggcgcttacacctcaccacgccaacaaggagcaggtattatcgatgtcgcagcagcagttcagacaggattatacctaactggtggggaaaacaactatggcagcgttacattaggaaatattaaagataaaatttcctttgatgttactgttcataatatcaataaagttgcaaaagatttacactatacaacctatttaaatactgatcaagttaaagatggctttgtcacattggctcctcaacaacttggtacatttacagggaaaacgatacggattgaaccagggcaaacccaaacgattacaattgatatagatgtttcgaaataccatgacatgttaaaaaaagtaatgccaaacggctatttcctagaaggctacgtacgttttacagaccctgttgatggtggggaagttcttagtattccttatgttggatttaagggagaattccaaaacttagaagttttagaaaaatccatttataagcttgttgctaacaaagaaaagggattttatttccaaccaaaacaaacaaacgaagttcctggttcagaagattatactgccttaatgactacaagttcagagcctatctactcaacagacggtactagtcctatccaattgaaagccttgggaagctataagtctatagatggaaaatggatcttacaactagatcaaaaaggccagcctcatctagccatttcacctaatgatgaccaaaatcaagatgccgttgcagtgaaaggtgttttcttacgtaatttcaataatttaagagccaaagtctatcgtgcagatgatgttaatttacaaaaaccactatgggtaagtgctccccaagcaggagataaaaattactacagcggaaatactgaaaatccaaaatctacatttttatatgacacagaatggaaaggaaccactactgatggtattcctttagaagatggaaaatacaaatacgttttaacttattactctgatgtccctggctctaagccacaacaaatggtgtttgatatcactttggatagacaagctcctacactaacaacagcaacttatgacaaagatagacgtatcttcaaagctcgtcctgcagtagaacacggggaatctggtatctttagagaacaagttttttacttaaaaaaagataaagatggtcattataatagcgtcttacgtcaacaaggagaagacggtatccttgttgaagataacaaagtatttatcaaacaagaaaaggatggtagctttattctacctaaagaggttaacgatttctctcatgtctactatactgttgaagattatgcaggcaatctagtatcagcaaaactcgaagatttgatcaatattggcaataaaaatggtttagtaaacgtcaaagtgtttagccctgagcttaacagtaatgtcgatattgatttctcttactctgtcaaagatgacaaaggtaatatcatcaaaaagcaacatcacgggaaagacctcaatttattgaaattgccttttggtacctatacgtttgatctattcttatacgatgaggaacgagcaaatctaatcagtcccaaaagtgtcactgtaactatttctgaaaaagatagccttaaagacgtcttatttaaagttaacttactcaagaaagcagccttactcgttgaatttgacaagcttttaccaaaaggagcaacagtccagttggttactaagacaaatactgttgttgatctaccaaaagcaacttattctcctactgactatggtaaaaacatacctgtaggagactatcgtttaaacgtaacgctgcctagtgggtatagcactttagagaacttagatgatttacttgtatccgtaaaagaagatcaggtaaacctaacaaaattgacgctgattaataaagctcctctgattaatgccctagcagaacaaactgatattattacccagcctgtgttttataatgctggaactcacttaaaaaataattacctagctaatcttgaaaaggcacaaactttaattaaaaatagagtggaacaaacaagtattgataatgctattgctgctttgagagaaagtcgccaagctcttaacggtaaagaaacagatacttctttactggcaaaagctattttagctgaaacagaaatcaagggaaactatcaatttgttaatgctagtccattaagccaatcaacttatatcaatcaagtccaattggcgaaaaaccttctacaaaaacctaacgtcactcaatcagaagtagacaaagccttagaaaatcttgatattgctaaaaatcaattaaatggtcatgaaactgattactctggtttacaccatatgataattaaagcaaacgttctgaaacaaacatcatctaaatatcagaacgccagtcaatttgctaaagaaaattataataaccttatcaagaaagcagaattgctgctttccaatagacaagctacacaagctcaagttgaagagttattaaaccaaataaaagcaaccgaacaagagcttgatggccgtgatagagtttcttccgcagagaattatagtcaatcactcaatgataatgactctctcaataccacacctatcaatccgccaaatcagccccaggcgttgatattcaaaaaaggcatgactaaagaaagtgaggttgctcagaagcgtgtcttaggggtgactagccaaaccgataatcaaaaggtaaagacaaacaagcttcctaaaacaggcgaaagcactcctaaaataacctatacaatattgctatttagtctctctatgctaggtctggcaacaatcaaactaaagtctatcaaaagagaataaaatactttaaaaaatagagcaaggcatcaattactagctattaatagttagtgactggtgcctttttgaggagcttaaaatgatgttcctaaagaccttttctctgcagtatcttggtttataacaccataacacttcaaagaatgggaaaaaaactctttttttgttatatttgatatgacataaacagctagctaaaagtcaaattataactatgggtattgaggtatacatgacaaaaataatttatttcgctgatgatgaaaagaatattcgtgacttggtggttccttttttagaacatgatggtttcactgttcgagcatttgaaactggagaccttctcttagaagcctataaaaaccaaaaacccgatttagttatattagacataatgatgcctggaactaatggtttagatgttatgaaaagcatccgccaatatgataatattcctattatcatgttaacagctagagattctgatgttgatttcattacggcttttaatttaggaactgacgattacttcaccaagcctttttcacctataaaacttagtctacatgttaaagcattgttcaaacgccttgatgaaaaagcaatcaaaaatgacactcagtatcagttcctagatttaactctggataccgaaaagcgaatagccctattatcaaatgaagaaatgcccttaaccaagacagaatttgattttcttttagtattaattgaaaaacctgaaactgctttttctagggaaacactgcttaatcgtatttggggatttgatgatattgaaagcagagcagttgatgacactattaaacgattacgtaaaaaatttaagcaataccacagtcaggttagtatcaaaactgtctggggttacggcttcaaattaatcaaagaggacaaatgaaaaagaaaagtttaattagcaatcttatccttattaatagcatcactctatttcttggtttttacctcatctatttttctgtcaactatgtcattaaagactatgtccatcaaatgacaaggaattccatgcaggcgaatttcaccattttagatagtatctataacaacaagaaaataccagatgaaaatatggttaaccaagatagcatctttgtttggtcttactatgctatttttgaccagcattatcgtatgaaatatggcactgataatcataaaaaagagagccatgatattattcgctatcttacccaaaaaagattgtggcaaatttctaaggaaaaagatggtatgtttgtaaccatcaagaaaaaaacctattatgtaatgaccaaagactactctggtatccttgttgatggtagcataaaaaaagttcctaaagcacagtcgcaactttttcatgtgattaacttttcagacattacttacacccagcatctaattactaaaattaatcattttcttatagttatcttagtactaacctatattcccatgctatttattatgaggaagactttcactggaattagagaatctattcaatcagtacaaacttatatttccagcctttggaaaaatcaaggcaatcatcaatctagtcaaaaagaaattgtcttttctgatttcgatcctcttctacttgagagccaagaaatggcaaatcgaatctaccaagcagaagagagccaaagaaacttctttcaaaatgcctcccacgagttacggacacctttaatgtccatccaaggatatactgagggagttcaagagggtattattgatgccgagctcgcacactctgttattctgcaagagagcaaaaaaatgaaacagctcgtagacgatattatcttactctctaaattagatagtaacttaagtgatcaaaaagatgaattttctttaaatgaattacttaatagtattattgcttatttcaaacccctagctaataaacaaaagattagtattacttatagaccagacaagcatgaaaagttactaaaaggtaacgaagagttgattcaacgagctatcaataatatccttagtaacgcactacgctatgctgtttctcatattgaaatctcttacacaaatcaaaaactaactatctcaaacgacggaccagccatttcaaaagaagacttgccttatattttcgatcgcttctataaaggacatggcggccaaacaggtattggacttgcaatgactaaagaaattatcaagcaacatcatggtaatatcatcgctgagagtgattcgacctcaacaacttttacgatttatttcaattgccacaaaattgcctaacttttcctacaaaaattcaaagaagttattgcttttttaacctataatacctatagatcaaaaagttattctaaaagaaagtgagtttttatatgttacattctaaaaaaatacattccttatcgcttattgccgttctctctttagcaacatatacgagtttacaaccaaatcatgtaacggctgaacaatcacaaaaaacatcaactgttcatatgagtcaaaaaactattgaacataagttaaaagttgcagataaagaagctgctcctctctacgctaaaatcgaccatatccaacgacatattgaagtcaaaaaagcaaaagatttaaaagttattgaattgtatattaacaaagatatcaaccaactagagaagcaaaataaacgtctactaactaaattctatacttctattgataatcaaacatgggatagcacaagtgaagtcaaaaaattgattgataagacaaacctatccactaacgaaaaagatagattaaaattatattttgaacaacgtgcttaccttgagacaaggttgaacgaccgctatcaaaaatttgataactctattgaaaaccaaaataaagaactaaaaatattaacgtcaaaaatagaaaaaatctatcaaaaacatggtattacaaaagaggtattaaaaacttactatgctaaaaaaacagtacgagctgactgatttagctaaaaatagaaaaatcccaaaagttaaacttttgggattttatacgcgtaaatatcactatttctagtaaaatctttatcttatttcaccacaatattaacgagtttgtttggtactgcgatgactttgatgatgtctttgcctgcgatttcggcttggactttttcgttagcaagagcaagatcttgcaattcttcgcgtgaaaggtctttagcaacgacgagtttagctttgaccttacctttgatttggacaacgatttcgatttcgttttcaaccaatttgctttcgtcatagcttggccatggcacgtaagagattgactgtcctgaggctgtcaagacttgccagagttcttcacctaagtgcggtgcgaatggtgcaatcaattgaacaaagcctttggcatagtcgctaaagagtttgtcttccttgttggctgcattgacaaagaccatgagttgagcgatagctgtgttgaatttcatttggtcaacttgctcagtaactgccttaacagtttcgttgtaaaccttgtcaagagctccgctattttcctcagtgatctctttagtcgtgatcaaacggtaaacacggtccaagaacttacgtgagccttcaagaccttcttcagaccaagcgattgaagcatcgagtggtcccatgaacatctcgtaaacacgaagggtgtcagcaccgtactgctcaacaacatcatctggattgacaacgttcttaagtgatttagacatcttagcaggtgcttgttcaagctcttcaccagtttccacatggaagaagctgccatcacgtttttcaaccttgtcagttgccacaagagcaccacggctgtcgcggtagcttgttcccaaaatcatcccttggttaaagagtttttggaatggctctttggtaggtacgacaccgagatcataaagaaccttgtgccagaagcgagcatagagaaggtgaagcacggcatgctctgcaccaccgacatagatatcaactggcaaccattgtttgaggagttcctcgtcagctagtttttcagtgttgtgtggatcgatgtagcggagatagtaccagcttgaacctgcccattgtggcatggtgttggtctcacgacgacctttaacgccatcttcacgagtgacttccaaccagtctgtcaagttagcaagtgggctctcaccagtacctgaaggacggatatccttagtaactggaagaactagtggcaattcgctctcaggaaccgcagttgatgttccatcttcccagtggatgattgggattggctcaccccagtaacgctgacggctgaagagccagtcacgaagacggtaagtaactttctcattaccaacaccttctgcttcaagccactcgaccattttggcaatagctgccgctttgtcgagaccatctaggaagtctgagttgatgtgaagaccgtcttctgtaaaggcagcctcttcaacattcccaccttcaagaactggaatgatgtctaggttgaattgttttgcgaattcccagtcacgttcatcgtgagctggaactgccatgatagcacctgtaccgtagctagcaaggacatagtccgcaatccaaactggaatttctttaccattaactgggttaatggcataggcacctgtccagacaccagttttttctttggcaaggtctgtacgagcaaggtctgatttgagactcgcttgacgtttgtattcggcaacggcttctgcttggtcagctgttgtaatagcatcaaccaaggcatgctcaggagcaagaactgcgtaagtcgcaccaaaaagggtgtcaggacgtgttgtaaagacagtgaagtccttatctgtatccttaaccttgaaggttacattagcaccagttgatttaccaatccagttgcgttgcatgtccttgattgactctggccagtcaacttcttccaagtcttccagcaagcgctctgcataggcagtgattttgagcatccattggcgcattggttttctgacaactgggtagccaccacgttctgatgtaccatctggaagaacctcttcgttggcgatagctgttcccaattcttcaacccagttaactggaacttcagcttcgtaagctagacctttttcataaagcttggtaaagatccactgtgtccacttgtagtagttagggtcagttgtgttaacttcacgatcccagtcgtatgagaaaccaagagcattaatctggcgtttgaagttagcgatgttttcagctgtaaactcagctgggtcattaccagtatccatagcgtactgctcagcaggaagtccaaaagcatcccaacccattgggtggaggacattgtgaccttgggcacgtttgaaacggctgagaatatccgttgctgtatagccttctgggtgaccaacgtggagaccagctccagatgggtatgggaacatatctagggcataaaacttaggttttgatgcgtctgttcctgttttaaaggtatgattatctgcccaaaaagcttgccatttgggttcgatttctttgtgattatagaatgtcatcgcacttctccatgtcaaaaaagtatagtcttcttattataacacgaaaaatagcaataaaaaaggtgaaaataccctcaacagcaggttctctccccacttatccttgacaataaactaaacttactctatactatttccaaatgacataatgctttaaccgtgtcctgtgagacatataagcgaccaaaataggattctatacagaaatcctactatttttgcgagcgtttatagaactcaagggtagcagcttgagttttttcttttacattataatgagttgaagcagctatgacatctctgttttagaattttttctattgacagtatttaataacggtggtctgtgagccatcattaaaggaggagacttatgtcaccattaaatatcaataagaataattggcgcgccctaatcgctgccattgtcgcatccggaaccgatgatttaaatatcatgttccttgcattttctatgtcaactatcattactgatcttcatttatctgcggcacaggctggttggattgggacaattaccaacttgggaatgctcgtgggaggactaatctttggtttattagctgatcgctacaataaatttaaagttttcaaatggacgattctaatcttttcaatcgcaactggtttagttttcttcactactaatttatcatatctctatatcatgcgcttcattgcaggaattggcgttggtggcgaatatggtatcgctattgccattatggcaggaattgtcccaactaataaaatgggccggatttcttcactaaatggtatcgctggtcaagttggatctattagctcagcactcttagcaggatggctagctccagcactcggttggcggggactttttctctttggccttctccctatagttctcgtcctatggatgcaatttgctgttgatgataaagatatcttagatcaatataatacagacgcagatgatgaacctctagatatcagtataaaagctttatttgatactcctgtattagccacacagagcctagcactaatggttatgacaactgttcagattgccggatactttggcatgatgaactggttaccaactattatccaaaccaacttaaacgtttctgtcaagaattcatcattatggatgattgcaaccattcttggaatgtgccttggcatgctagtatttggtcaattgttagataaatttggaccgcgtttagtatacgggtgtttccttctatcatctgcaatttgtgtctatctctttcaattcgcaacaacaatgccttctatgattataggcggggcagttgtcggattctttgttaatggtatgtttgcaggctatggtgccatgattacacgtctctatccacatcatattcgttcaacagctaacaatcttatcttaaatgttggtcgtgcaataggtggcttttcatctgttatcatcggaatgattctagacgtttcaaatgtctctatggtcatgcttttcttagcaagtctctatatcgttagttttttatcaatgctaagcattaagcaattaaaacgtcaaaaatatcacactaatttaacacaattagatgtcaaaccaactgactgatattacaaaacagtattcctcaattgagaaatactgttttctttatttcattagataactattcagctcaggcatcacacttttagcatctttcataccaagctgataaatactatcaagtttatccggattcttctctaagcggccaataaccaagctcttactcggtctaattgcaaatagatcgcctgttttttcaaggctcatgaccttttcaagactattattatactgttggtaccgattcgaggctgtctttacaaaattaggatatttcctatacagagttttatacaatcgtccacttgaaggctttttctgataattgagcggcctagtcatcacaacaatcaacttgtcaaatcctaaaccacgggcaaaatcaacgggaatactatcagataaaccaccatctaagtactttttcccctgccaatcaaccatctttgagactactggtaatgctgaactagcacgtaaaatttccatttgttcaaaaacactatcaattttaaaatattcaggtttaccagatgtcatctctgtagcaactacgtaaaaatcaatacttgattttttaaatgcttcatcgtcaaatacatccaatttcataggaacttcataataggtgaaatctttattaacaaaattccctgttcgaaaccatgaccttagactcatatatttagggtgggataaatactttttattgtatcgcaaagccctctctcgttgtctagatacaaaattaacaccaaacaatgcaccagcagagacagatacgataccatctatttttattcctgcatctagaaaagcatctaaaactccagcagtataaagacctctcattccgccaccctctaaaactaaaccaacagacaacataggcaatcactttctaatattgatatttgattaaagtatagcaaaatatagctgttttttctgaaaaagaatatgttgtactatataaactccataattaatttaataataatttctgaatcacactcacctatgatagaataatactaatagtttttaaatttatatttactatatctaactaatataaataaaggattttttatgacttatcaaaaaacagttgttttggctggtgattattcctacattagacaaattgaaaccacattaaaatctctctgtgtctatcatgagaatctctcaatttttatttttaatcaagatattcctcaagaatggtttttagctatgaaagatagggttggacaaactggaaatcaaattcaggatgtaaagctcttccatgatcacttatccccaaaatgggaaaataaaaagcttaatcatattaattatatgacctatgctcgttatttcatacctcagtacatctcagctgatacagttttatatcttgactctgacttagttgttactactaatttagataacctctttcaaatttcactagacaatgcatatttagctgcagttccagctctttttgggcttggatatgggtttaatgctggagtaatggtaattaacaaccaacgttggcgacaagaaaatatgactattaaattaattgaaaaaaatcaaaaggaaattgagaatgccaacgaaggggatcaaacaattcttaatcgcatgtttgaaaatcaggtaatttatttagatgatacctacaattttcaaattggttttgatatgggagctgctatcgatgggcataaatttatttttgacatcccaattaccccactcccaaaaattattcactacatttcgggaatcaaaccttggcaaacattatcaaatatgagactccgtgaggtatggtggcactataatttacttgaatggtcaagtatcatatctagtaaaaaagtatttggtttagaccacccaattaaaacacaaaattatcgtctcaatttccttattgttacaacttctgattgtataccatctatctcagaattagtcactgcccttccagattgtctatttcacattgcagcaccaacagttatgtctgacattcttataagcctattagcttttgaaaatatccgccttcataaaacttacactccacctattattgataaattattagcagaagctgatatttatcttgatattaatgtttttggaaaaatggagggcattctacagaaaatgtcacaatctgaaaaaccaattcttactacaagagaatgcaatagccagcttgttccagaaacagtttttgcatctatcgatgatttaattaattatcttcagtctatataaaaaaattggcatccattcactatatacccaacattattctaaacacttaactaggagaatttaaatggaaaaagcagttgcacttgcagttgattcaaactacttggataaagccttagtaacaataaagtctatttgtgtttataatagaaatataactttttatttattcaatcaagataccccagttgaatgggtacgtaatataaacaggaaactagagcctctaggatcaaaactgattaatgttaaaatatataactatgatattgctcatctaacgacttttctaactgttagtacatggtttagattatttttagcagattatatacctagttcacgtgtactttatttagattcagatattatcgttaacactaatcttgattacttatttgaactagattttaaaggttattacttagcagccgtcaaagatccccataaaaatgaagaaggagggtttaatgctggcatgcttttagctaatctagaactatggcgggaagatgggctcactaaaacattactaaaaacagctgaagaactccaccgagttgtcaaaacaggggatcaaagtatcttgaacattgtttgccataatcgttggttatctctgaacaaaacatggaactttcaaacttatgatgtcgttagccgctataatcatcgatcttatttatatctaaacatagaaaatagaactcctaatattatacattttttaactagtgacaaaccttggaatgaaaatagcgttgcaaggtttagagaactatggtggtattacttccaacttgatttttgccaattaaccggcaagcaaagaaaagtgatttcttacgaaaagtccatggaattgctttctgtttcagatattcatcttttcactcttacatcttccgataatttagaacacattgaatcgctaatttgtagatgtcctactgttcaattccatattggtgcctacacaacagtgtcaaataaacttagcaaactagaacaatatccaaatgtcctagtttaccctgaattaattgaggcaagaattgaaaaattaataacattagccactgcataccttgatattaatcatggtccagaagtaggtaatattttacaaagagttcatttgaaacaaaagccaatttattctttcaacaacacgtctcatcaagagaatataaccaaacatatcgttaatcataattctattgataatatggttgttttaattaacgaattaaacctaaatcaattataaattaacaaaaatccatctttattttaagatggatttttcagaagttttataattctgcaacttggtacaactcaagttctgcttgtgtttctgagccgaacatgttgatcattaatttaactttgttattctcaatctcaactacacgtccttcttgtccgatgaaagcaccatcaatgatttgaacaacatcaccttccttgatattagtatcaaagacatcaacggtttgtcccattgagatgagtattgaacgaatctcttcttctaacaacggtgttggtttagagcgattgccgtgtgatccaacaaatccagtaacgtttggagtattacgaacaacaaaccaggcttcatcagtcattaccatttccacaagtacataacccgggaagcgattttcttcaatttcttttgttttcccatttttctcaacatttacagtttgagtagggatttccacacgcaaaatgttgtctaacatattataagtttgcgcacgttgcaagagattttcctttactttattttcataacctgagtaggtttggagtacaaaccaacccttatcaaaagaatctaacataagttttcctttccttaataaaaaagccttttacggcttattggactgctattttcaatatatattataaagaaaataaaataagctgtcaattaaagtaccgactaaatcattctaaaattcaaataaaaaaggcaaagttctgatgaggtttgccttaagattttgaaaggatagacctttcggtttatgtttaaaaataaatttaattttttttatgctttaaaactatcgtaataagacctgcacttaacataacaattagtgatacaattgctaagagtggacttgcggcttcacccgttgatggtaattttttactatactttttgttttcaatagcttttttagccgccaagtttccgctagtattaaccgattttttggttgctggtttggcctctggtttagcttctagcttagcctctggtttagcttctgacttagcctctggtttagcttctggcttagcctctggtttaacgtctggtttagcttctggcttaacgtctggcttagcttctggtttggcctctggcttagcttctggcttagcttctggcttagcttctggtttggcctctggcttaacgtctggtttagcttctggcttaacgtctggtttaacgtctggcttatcctctggtttggcctctggcttaacgtctggtttaacgtctggtttaacgtctggcttagcttctggcttaacgtctggtttggcctttggtttaacgtctggcttagcttctggtttaacgtctggcttagcttctggtttaacgtctggcttagcttctggtttaacgtctggcttagcttctggcttaacgtctggtttggcctctggcttaacgtctggtttggcctctggtttggcttctggcttaacgtctggttttttatcttctttagtacctctggtaaggtcttgaagttcttttaaaagctttttgacttcatcaagcattttttttgcttcatcaagtccactttgaccagtccaaacactcctatttccgaaagtttgtttatctctaaacctattcaaataagttcccacagagtctgcataatatccaggtgtaggcaaaatacttttatgcttttcataaatttctttagcctttttagataacgctaatccttttgaacttattctttcaatttttttagcatactgcttttgtaagtttttctgggcaacttcctgtgctgcttgcttaatactatttaaagcattcattgcagcagtaatattgagcttaccttcattatactgtttcactacattatcaattgcagtattatatctcaacatttcatcgttagataaattttctaacttagcaatttcttgctttttaccattggcctgatttaccaacgtttctttattggaattaacaacttttttagcttctgctacaaactcatcaacttgactcttagtgctagctctttgaattttttctttatattcttctaagacttcggggcttatattttttattaaggccacgtcattttgagccatttgcttagcttttgttgattcagcattattcagttgcgtggcttgagttacaaatttaagaataagttgcgaatcttttgaagagctaatagatttaactaaaatatctttttggtctgatgaaaggaaacctaatgacttaatgatatcttgagaacgtcttgactgcttacctagttcttgatcactaactttagcatgtgtagttacacttggtttattttgcttaccaatttgtccttgatataaaatatttctaatttctgcttcagtactattaattaattgtggaagtgtatcctgtgatgctctattaaaatcatttactctacttaaaagtatagcaatagctttgtcattaccacgatatttagaaatcaaattcttcagagtaaccgcccctaaattaacttgtttcttatgaggaattgaagccgatattcctgaactagtatccgcgtgtacaataccactacatacagcaaacgctgctgacattgaggccaaaccataagctgtttttcttaaaaagtattttacttttttttcgttattattcatattcgctcctttatatagttagttgaaaatcctaatttattaggataggaccacgtttattttaatttaatttgagttccttaactaattatataacttggagttttttatttcaacacttttctttaatttatttacattttattaaaataaacatcttttttttaatgtttttttgctcaacaatctagtaaaaataatcaaaagattatttttttataatttaatcggatatatatgttattttccacacaaaaaacccttagtaaaatctaagggtttgggttgtttctatctaaaataatctattattaaaatcgattaatcaagtccatgactcctgcggctaacagtttgtcaaagatgtagataacgattgtgaaaaatacagtgtattccaagatggaaataaaatctttccaacgttgttttcgatttggccaagtagtgtcacgcaatacttgaaaaatccctttgacaaacattatcagttctcctttttgcagtttgttacgctatatcaacgcgtttctttgtgtattgtatacttcttacaatatttacaaaatttatttacttctagtcgtgttggcttgggggtgctacttactccgattgagtaatttcggcttccgcattctgtacacgctaggcttgctttcttttgtgccataacgcctccataagtgctattttaacatgatttgtataatcctgcaagctatctaaagtagtcctttagactattccaagcatcttttaccttctcttggaaatttgaatcttccaccgctctagaaatatcttgtgcagccttacttgccgaatcttttaaatcattaataattgagcgtgattcttggttcgttgtattactagcatcttgtgcattataaactgaaccaataccgttttggaaataagcattctcaatatgagtaaaactagaccccttagtatacggtagtatatatgaagcttgcgtgctaaatatatttgaagctgtacctgcactagaatctgtcaaataatggtgtttatctgtgttcttaaagccaacccattgactaataacgacatcaggcgtatagccgactacccactggtctccagataaattggggttaaaatctgtttcggttgttccagttttacctgccattgtataaccataaacattggcattaatagctgtaccatttgagaatgttcctaacatcatactagtcattttactagccactgagcgactaataactcgcttaggcttatctgtaaattgctttactaattttccattagctgtctcaattcgagtaatcaaatgagcgcgatgcattataccgtcatttgcaaaagttgagtaagcttgtgccatttctaaaggattagtggttacacttccacctagcgccactcctagctctttgtttgctgatgacatatttagaccaaacttcctgccataagtaaaggctttattgattcctagtttgtctaaagtataaacagcaggaatattataagaattagctagtgcttgatacatcgggatactttcagtctcaatcccaccatagttacttggtttataaccatgaaaatcttgaactttattaggaagttctttatctattgaccatcctgaagcaatagctggtgaataaacaactaaaggttttatggttgaggctggacttctctttgattgagtcgcgtagttaaaacttctaaactgtgcatctttagtactttgaacacgtccaactaaacctcttacaccaccagtttttggatctaaagctacgctagcaccttgggcagattgaccatcatagtcagatacagggaagaggctagtatcatcaaatgttttttgcattcctgattgataattttgatctaatgcagtgtaaatcttatagccattattgacaatatctttttctgaaataccataagtatcaatggcttcattgacaacagcatcaaaataggatgggtacctgtaatcattaattttaccagcataggtatctgctaatctatttttcataccaattgaagcagcttctttagcttgagacttggttagtttacctgcatcaaccatcgctgccaaaacagtatctcttcggttagttgcattttcaacagaataataaggattataaacttctggtcctttaagcattccagcaagtgtagcagcctcatctactgtcaaattagcagcactggttccaaaatatttcctactagcatcttccacaccccaaacaccattaccaaaataagagttattaagatacatggtcagaatctcagccttgctatatttcttagtcaattctagcgctaaaaagaattcacgcgccttgcgtttaatcgtttggtcctgtgacaagtaagcattttttgctaattgctgggtaatagttgagcctccgccaaatttcccaagtgtagctactgccaaaaaaaatcgcttaaagtttacaccattattttcataaaaagttctatcttcagttgctataacagcatttttgagatgatcagaaatagcatttaactctacataagttcccttttgtcccgaaagttttccagcatattctttattcttatcataaatggtggtggttgtttttagagcactctgtaaatcactaactgtagcagttttagaaagataaaaaagatagctaccaaatataagaataaaagccattaaggcgataaaaagcaacttcccaatacgatagcgccgccaaaaacgacggataggatttttaggagaagggaggtaacgatcaactttttgtagccattcaggtcgagatttagcattttccttttggtgacgaatgcctcgctgatactgggatttactaggtcgggtaatatcatcaatatcatagacttcttcgccatccaaattgctagtttcttctctagtttcttgttcattttttcttgtcatttcgtcgttgtcttcatcaacacgaaataagtctataaacttatcaaataatttcatagacttattatatcaattttcaataaaatgctataataaaaccatgtcattttcattaaaaattagaaatccatacggtgaacataccgttaaagaactccttgaagattattttttgattccacgtaagattagacattttttgcgtgttaaaaaacatgtacttataaacaatgaatttattaattggcaaactgtcgtccaagaaaacgatactattaccttaatctttgatgatgaggattaccctactaaaaaaattcctctgggcagagcagagcttattgattgtctttatgaggatgaacatcttattatcgttaataaacctgaaggtatgaaaactcacggtaaccaaccaaatgaaatagcactgttaaatcatgtatctgcctattctggacaaacatgctatgttgttcatcgcctagatatggagaccagtggagctgttttatttgctaaaaatccatttatacttccccttatcaatcaacgcttagaacgaaaagaaatttggcgtgaatattgggctttagttgaaggaaaattttcacctaagcatcaagttttgagagacaaaattggacggaaccgtcatgacagacgtaaacgaatcattgattctaaaaacggtcaacatgctatgacaatcattgacgttttgaagtatatccaaaatagtagtctcataaaatgccgactggaaaccggaagaacccatcaaattcgcgttcacttatctcatcatggacatcccttaataggagaccccctctacaacccttcttctaataatgaaaggttaatgctacacgctcaccgattgactctatctcatccattaacttgcgaaactattagcgtagaggccccttcatctactttcgagaagattttaaacaattataaaaaaggagttggataataattatccaactccttttaatcattattgcttagttaatggcttactgagtagtggtttatggtaatcaaattctccatcactagatgtctgccagatcactgggatgatcttattcccttcaatttttattccataggcgtatttaactttaagaccaccgatacctcctgttacaaaagttgtagtatcagtacctgattcatattgataaaggtagagcccatttcccttatcctccaacttcgtaactttagcagaatggttactttccttagatttactatccttgtaaacttttttctgagtaactttaccatccttatcaaaagtcatcgttactgtaccgtcctcaacttcacctttccaacttcctacaaggttctctggaaaaatggaaacgggatcagccttaactttattagtttccttagctactgtgatatcttttttaccatcattagaaataaggtaactatttcccgattttttcataataaaattaccagttaaattctgaataatgtggccatatgttttcttatcaggatctgttgatttatcataattaaaatcataatcggcagcaaaattaacttgataactttctttcccaacctgtgtcattttattaaggacaatattaggaatagtgaaatggctcgctttacgattatcagttacaaattttgctttaatactttctttcaatcctttgtaaaaatcattttcggcacctttttcaaaaactgttcctaaagtctgagggtcttgcccagttgatacataaagtatcaattgattgaaagcagttatcaatttctgtccagcttctttttcatttaataaaccatcaacatctaatttgattgtctgattatcagcgatagagattaatttttgtttatgagaggttatctcaccatcattaaaaacttttttgatataagcttttgaaccatcagtcactggataattctctacggaatggctaccatcttttaatttagcaatacgattatcaccaaaataaagattaccatccataagattacttgttactgtaaaagatttaaaagcgaccgataaatcaatagtttggtttttaccatcataatcttttttgagtttaatctcttttccgtcactagtcccttcaaggctagcagtataatgggttctaggtaaacgttccaccgttactgaaaaatgatctgaattgcttgtcgcgacctttttttgattcaacaaaacatccaatttaggaacattggttttcaaggtcaaagacataggcttattagcaatacgataatcagggaatatacctaagcgactacctacacgctttagatacattgaatcatttttgtttccttcttttatttcctgccctaatttacgcgcctcacttttagacaagggctcaaaattagcgtaattggcctcatcatttgtgatagattctcccgtatctgaccaaaccatgtattctttaatattatcaaacgcttgacctgacgtacgagaacgtgctgctacaaaacgactaagtacttgtccctttgaaaaataaaagaatcctagactcagaagtgatactaaaactataccaaaaataactaagcacactttaacaacttttttcttaaaaaaatcaaacataccttatcctctcattcactttatattaaagtaaattgcttaaagaaaagttacaacactgataaaacagctgtatttgtacttgtaaccgctatttttctattataacaaaacgaaaaaaggattgaaaccataatccgatttcaacctctaaaatttttgtctatgattatactaagtcctgcaagaagctttctccaatcatcgcagtatcaacaccaaagttatccgcaactgttgctgaaatatctgcgaaatgccctactgggataagtccgtttcctgtgaaggatgggctataggctaagagaggaatgtattctcttgtatggtctgtacctgcataagttgggtcattaccatgatcggcagtgatcaaaagtaagtctttgtcacgcattgctgaaatgatctctggaagacgctcatcaaactcatgaagacaatcacgataaccatgaggatcacgacggtgaccatagagagcatcaaagtcaaccaaattagtaaaggagaagcctttttcaaactctgataaccccattgtttttatcaaagtatcaataccatgactatttgatttgttatgtcccatatcatgattaatgcctgaaccattgaaaatatcattgattttaccaacagcataagtatcgatgccagcttgatctagtttatttaatacggtatcttcaaatggtgatactgcatagtcgtgacggttggctgtacgcgtaaagttacctggttcacctacatatggacgagcgataatacgaccaaggagagctggacgctccattgtgatactacgagcatattcacaaatccggtagagttcttctagagggatgatatcctcatgagctgcaatttgtaggactgggtcagctgaggtatagataatgagctcaccagtttccatttggcgtggtccaaagtcatcaataacagctgtccctgaataaggtttattcgcttcacgaataactttacgtcctgaaaaatcctcaatctttgtgataatatcttctggaaaaccattccagaaagtatcaaatggctctgtaatatttaagcccatgatctcccaatgccctgtcattgtatctttaccaagtgatacttcttgtaacttcgtcgcgtagccacttggattttcttctgcagggacggtcttaagcgcttggggacgaggaatattaccaagtccaattttagccatgtttggcaccgcaagtccaactgtttttgaaatgtggccaagcgtgtctgaagcaccatcaggaactcctgcattgacaaaatcattggcatctggtgccgctccaatacccactgaatctaagacaactaagtgaatgcgatcaaattgtgacataacttctcctttatcaattgaaaataggaagtcagaccagcatccttcctatttcctttatattatttaataagtgccttcttcaactttttggttcttaacaatcttgatgatacggctagtacccaagcgtgaagctcctaaagcaataaatttttcagcatcttccaatgatgagattccacctgctgccttaattttaacaccttcgccgacatattttgccatcacttcaacatcttcaaatgtagcacctgctgtcgaaaaaccagtagaggttttaataaagtctgcacctgaacgtgtgacaaccccacaaagttcgataagttcttctttagttaattgacatgtctcaacgataacttttaagatatggtcttgacatgcagccttgatttgacgaatttcttcttcaacagtatcaaaatccccatttttaacatctgtcaaattaatgaccatgtcaatttcatcagcaccatttttaatagcatcttgacattcaaaaaccttcgctgcagttgtactatagccatttgggaacccaataacagtacaaatagctaatttacctgaaacgtactctgctgcttttttgacgtaagaggctggaatacatgctgaagctgtttcataagccattgcatcatctaaaattgtttggatttctggccatgttgctgttgttgctagcaaagtatggtctaccgtttttaaaatatcttttacttccacgttactatccttctttcttttgtcaacttttagaatagagttacaataccgacgataaaggcgctaagcatacttacagcaataccaccaatcattgcacggaaaacaagtcgagctagggtgccacgtttctctggacaaagaacagcaatacctgaaacacaaatacctaaacttgataaattagcaaaaccacaaagtgaaatagttgctaccaatgctgtacgataatctaaagatttgattaggtcacccaattgttggaacgaaacaaactcatttaaaatcaacttacttccaagaaggtttccttctagaagaatgtttttgtggtcaaatcccataagaaaaccaaatggagcaaaaacatatgagaagatttgttctaagcggattcccaatccacttaacatcatattaatcaaagaaactaaaccaacaaaggcaatcaaactagcaccaattgagaaagccatttgtgcacctgtgcttgcaccctcagcgattgcatcaatcacattggcgttattacctttattatccatcttaatgtcatcaattttttgaacaggttctgtttgaggcaataagattttagcaatgagaatactgccaataggaaccattgttgaagcaatcaagagatattccattggaatgcctaatgcaatgtagccaccaagaatagaaactgacatacttcccatacctgataccaacacaaccattatctcactatcagtcatacgacctaggtatttgctaaccaaaattggactgtctgtttgaccaagaaacatattagctacggcaacaaaactctcaacctctgaggatttcataattttaccaacgcccttacctatccattttactacaaatccaaggattcctacataataaagtagactaactagggcagataagaaaacaatattgccaagcgtttgaatggcgaaaataaaaccagtttttgctccactatctgctaatgaaccaaacacaaaatttaatccagcttgaccacagttgattactttagtaactccagttgaaacaacactaacaacttgttgacctagtgggatacgtactaagattagcgcaataatgaattgaacgataagagcttttccaattaaacttagagaaacactcttacgattgaaagaaattgcatacacaattcctaataccaataaaataccaataatactataaataaattgcatgatgacttccaaaacctcgcttattgtgatttatcattttcaataagtgtgcggagtgcttcaacagcaacttgaatagctgcttctgtgtcatgagccattgggttatccatacccaaagcgttgcgttcttgattaccaacaacaaggaaatctgatccacaacgaactcctagatgacttgctgctacaaaaagagctgcagattccatttcagacgcttttgttcccagacgtttccatgcttcccatttatttaataattcataactaactggcatacgttctggctcatgttgtccataaaatgcatctttacattgaactactcctgcgtgacttgtgtaaccaagctttttagctgcattaactagagcattcgttacctccaagtcagctacagcaggaaattcaatcggagcatattctttacttgtaccttccatacggatagctccagttgcaataacgatgtctccgcctttaacatcaaggtcaataccaccacatgttccaacacggataaaggtatcagcgccacagagtttcaattcttccatcgcaatagacgctgatggaccaccaataccagttgaagtaacactgactttttcaccgtttaatgtacctgtataagtaacatattcacggctgtctgctacaagaactgcattatcaaaatgttctgcaatttttgcacaacgttttggatcacctggcatgataacataacgacctacatcacctggacgaatctgtaggtgatattgcaatccgacttcacctgaataattctgcatgataaagacctccttaatgtcttgtctatttttttacacttgtataataacatacaagacaacctttgtaaacgcttttatcgaaagaaaacgttttattttttaacttgatttttctaattttttcaattaaactaacttgtatacggaggttacaatgcctaaaaatgaactaaataataaactaaataaactaaagcatgtacaagtctacaataagatttttaacatgattcaagacggtacttattctcctggaatgcaattaccttctgaacccgaattagcagggcaacttaatgttagtcgagctactttacgaaagtcattagcactattacaagaagaccatttggttaaaaatatcagaggaaaaggtaatttcattagagaaaattctagcaacttgtctgaaaacggttacgaaaatagacaacaccctattaaaacttgtctaacttccaaaattacagaagtagaattagaatttcgtgtagaggttcctgcagaagctatcacagcttcacttaaacaagaaacccctgtagttgttattgctgatcgttggtaccacaccgatgatggaccattagcttacacactttcttttatccctatcgaacttatttcagatgctgagatttctttacatgatactaaacagttgttaaacttcattgaagaaggtatctatcaagaaggcatatcaagccactcacaaagccatttgggatatgcgacatctggcaatttttcagcaactaaatataccctatccgatcatggacaattcatattaatacaagaaacaatttttaagcaagagaaaatactaatgtgtaataagcattacgttcccattgagcactttgaattgtccattacctctcattaaggaggcaagcctatgcaaaatagactattaaaagttgcttttttcataacttttaccgaattaattatgggcctaatagttggcgcttattttaagttaagttattttctagcccctccaaaggaaccgtcaatgggtgctgggtacggaatgctcttttctctgttatttatacttattagttacttaattctattagctataattcaattcttagcttatcaatctcaatctaagataatagcaatcattgttttgctacttttttcctcccactactggcaaatattagatggcctatccttatgatcttcttaccgcaagtggtagtgactatcatatctctattatcacaacataaaactcccctttgttaaaggggagttttatgttgtgataagttagtgattagaagccacccatcatagatggatccattgcaggagctgtaggagcttctggttcaggtttatttgctactactgcttctgtagtcaagataagacttgctacagatgccgcattttgaagtgcagaacgtgttactttgacagggtcaatgatacctgtggtaaccatatctacccattctccattggccgcattaaatcctgtaccaatttcagactgttttaaacgttcaataataactgaaccttcatatccagcattgtaagcaatttgacgaacaggctcttcgagagcacgaagaacaatattacgtccagtctcctcatcaccattaagtttcagtgccgctactttttcaataacgttcacaagagccgtacctccacctgaaacaataccttcttcaactgcagcacgcgttgcatttaacgcatcttcgatgcgaagtttcatctcttttaattctgtttcagtcgctgcaccaactttaattactgctacaccaccggctaacttagcaagtcgttcttgtaatttttcacgatcaaaatcagaagttgtagcctccatctgtgacttaatgatagctacgcgattagcaattgctgatgagtcaccggcaccttcgacaataacagtagaatctttatctactgttactttagcagactgtcctaaaacttgcatagtagcatcttttaagtctaaaccaaggtcttcagtaacgacagttcctcctgttaggatagcaatatcttccagcatggctttacgacgatcaccaaatccaggcgctttaacagctacgacattgaaagttccacgaattttgttaagaacaagcgttgggagagcttctccatcaacatcatcagcgatgattagcaacggacgatttgttttaagaacctcttctaataatggtaaaatttcttggatatttgaaattttcttatctgtaataaggatatacggattctcaagttcagagaccattttctcgttatcagttaccatatactgtgacaagtacccacggtcaaactgcattccttccacaacttcaagctctgtttccatacctcgcgattcttcaatagtgataacaccatcattacccacgcgctccatagcttcagaaatgtattccccaactttttcagaacgtgaagacacagccgcaacttgagcaatagcttctttgcctgaaactggttgtgcaatctcttttagctcttcaactgctgctgaaacagctgtttcaataccacgacgaatgccaatcggatttgcccctgcagttacatttttaagaccttcccgtacaatagcttgggtcaaaacagtagcagttgtagtgccatcccctgcaatatcattagtttttgaagccacttctgacacaagtttagctcccatattttcaaagtgatcttctagctcaatttctttagcaattgtcacaccatcatttgtaattaaaggagaaccaaatgctttttcaagaacaacattacggcctttaggacctaatgttactttgactgtatcagctaaaatatcaacaccacgcaccattgctgagcgggcatctgctgaaaatttaatatcttttgccataatttaatacccaggcctaaaatttaacaaagtctactttctttacaaagcaacttttctctaataggcctatatcctttcttgcttaataaaacctatttaacgacagcaacaatgtcactttcgcgaacaactgtcactttttcgttaccgtctttaacttccagaccagcaccattttcgactaaaacagtatcaccctctgcaacgctcggtgcaactaattcccctgttaaggtacgaataccgtcacccacagcaagaactttggctgtctttgtcgcatcatggcttgctcctgcaagaacaaaaccaccgacagatttctcttcagtttcaacaaacgaaatgatcacacgatcacctaatggttttaacataataaacgaacctccatacgagatatattttgattttttagcactcttatacagagagtgctaactacaaaaactattctatcacttggtcagaattagtcaagagaaaaggcacgtttcaaacaagaaaaatttccctagttatcctgtccattcactagagaaatttatattttaacctaagacaagggcatcatctatcaactgttgacctgagtttttatggaaaagttccattaattctgcaactgttaagtttctctttgcttctcctttaacatcaacaacaattttcccgtggtagagcatcacgagacgattaccataagcaatggcatgctccatattgtgcgtaatcattaaggctgtcaatcgttgttcttctatcactttctgtgttaattccataaccatatcgctagttttgggatctagagccgctgtatgttcatccagtaataataatttgggacgaacaagagttgccatagctaacgtgagggcttgacgctgaccgccagataaaaatgcagcatcagtcttcattcgattttctaagcctagacctaattgtgatagagactttttaaatagttgacggtcatcgtcagtcactgactgtctaaaaatgtgacgcttattgcctcttttatgtgcaattgccatattttcttcaatcgtcaaatttgttgcagttcccattctaggatcctggaagactcgactaatatccttagatcgtttttctacagagtctttagtaattgattggttgtctaatgtgattgccccctgatcaatagggatcagaccagcgatacagttaaggagggttgattttcccgcaccgttacctccaattactgaaataaaatcaccgtcttcaatcgttaaatctaaaccacgtaaaacatggttctcattgacagttcctttttcaaaagttttgtgcagattgactaattcaagtaatgacatgttcttatccttcctttgtaagtgatttagaggtttttactcctagtttagctcgtaattctgggacatacaaaatgagagccaacaaaattgctgaaaccaactttatcatctgtgcatcaatatcggttgttaatatgaaaacaataatcatacggtataaaacagaccctaatacaattgaccataaccttttgccaagaggtaagtattttatcattacttctgccaagataattgaagctaatccaataacgattgtacccactcccatattcaaatctgcatagccattattttgcgctaaaagtgcaccagataaagcaatcaggccattcccaatcatatatcctagcattttcatccgatctactttaatactattggcttgtcccatagcctcattatcacctgtcgctcttaaagctaatcctagttgggtatttaaaaagagatacaaaattaagataaccaagcctacacaaacaattccaattaataaaactgctgaaagtttatttaaacctaatcttgttaccattgtaaccaaagtatttttgagagcaaaagagacgtttgatcttcctaaaacaagtaaattaatagagtaaagtcctgtcaacgtaataatacctgtgaggagggctggtattttcattttagtatgaagaaaacccgatactagtcctgccaacataccacctaacatgcccgctatggttgccacaattggattaatatcattaacgatacataaagcgcaaactgcagcccccatagggaaagcaccctctgcagagagatcggctatgtctaagatacgaaaagtgataaacacgccaattgccataattgaccaaagtaatccttgcgaaattccggataagataatatctaacatacaatacctttctgattatttattatttttaatacttgaaacatcaattccaagctcttttgccatatcttcattaactactacttttagattttgaggatattctgaaggaactttagcgacgtctttacctttgaggattttaacagcttgtcttgccgtttgacgacctaaagcctcataatcagccccataagaaaagagcaaaccacttggtaccatatctgctgaacctcccacaacaggcacttttaattctttcgatagattccctaacagcgttactgagctggctataatattatctgttggtacaaaaataacctctgttttagacattaaactcttagcagtatcttgtacatcattagtggaagaaatacctttaacacttgttttaatccccgcctcttggaagattttttttgcttgttttacctgaacttctgagttacgctcgctagtggtatacataataccaacacgtttaaccttaggcattacttttctcaaaagggatacttgctttttaattggagacatgtcacttgtaccagtcgctaaaccttcaggttttttcattgattttactaattcggctgataccggatctgtcactgctgtaaataaaataggtgtttctgttgacaccgttgtcaacgattgagccgccggagtcgcaattcccaatactaatttattatctttaatgagtttttcagaaattgattggatatttgactgatccccttgagcattcttatactcaattttgatatttttgccatctttatagccttctttagctaattcttttataaatcctttcctagtggcagttagagagggatgttctacatattgtaaaataccaatatgttttacatcagattgaccattttgagaagattgtgaacaagctgtcatcagaacagttgctaaaacgctgctaattaccatctttgttatttttttcattactatctccttgtaataccatcaaattttccataaaacaaaaaaccaactagaccctacatctagttggttaattatttctctcaattcctctgtgcacgggagggcgaaaaaatattgccttaaccaactagattattgaaatgatctaatcggctctgctttcatcataaaatgctttagcttcatagatacaaactttgcgtgacgtttgtatccttgaggctacaaacgtctatctaaagaaactaaagtaataataagtatttgtttgtttaataatagacgatttgattaacatattattctctccttgtttatggttgcctataagtttacgtcatttaaaaataattgtcaatagttaaatttgatttttttgaaaattcttgttagatagataatttaaataatagtcattcgttgatataacacgcttttaaggaaatttagatttgctatccttaattttccatatactctactaaagcataataaataccatcgttatcattatcctgagttacatttccaattctctcttgtaaatctttaggagcattccccatgacaaaacctttacccacaatttcaagcagatttaaatcattatagttatcaccaaacgcaatagagtctgcaagagaaatatctaaatagtctgctaaagttttagcagattttcctttttcaatacctggagccattatttcaataaagtaaggagcagattgtgcgattgataaatgtggatattgagctttcaaagtgttctccaattctcccatcagagatggttctcccatcaagagaagtttatgaatcctatcttgcttctctaactccatcaaactcatctctttagattgtaaaccaacaatctcctcctctttttggacccactcattttctttatcacaggaataccattcatgataacgatagacattccatgcaattttcgaataatgcttgcttacataagaacaaacttgtaaggcaacttgaccatccattgtgtgggaagcaattgttttttgttgcatatcttgtattaaagccccattataggaaataatataagaatctattccaatttgttccataatcggagtaattgcctcaggcatcctagctgatatgggaacgaaagtagccccttgagctactatttgtttaattccctgccgtgtcttaggtgttactttaaaattactgttaattaaagtaccatcaatatcactaaatattagccttaccatattatcctccaaaatataattgtacacgcttactttagtctaacacttaaatttttgtttcgcaaataaacttcgtctggtctaatgagactactaatataagctatatttcaaaacaaattagtttatttctctcaatgaacggtgtaatatgttactatatagtaataataggaggattaactatgtcgtatccatacaaagccaatcattccattgaatcaatcaccttaaaagtaaatgacctcgaaaacctcgtaaacttctatagcgatatcattgggttaactgttattgacaaatcaagcactagagccttactaggggtaaatcaaaaaatccctcttattatccttgaaaaaactgaacttgaaaagcatagtacctatggcctttatcacactgctattttagtaccagatgaataccatctcagtctagctctaaatcatttattatctcagcatatccctctagagggtggagctgaccatggctatagcaatgctatctatctaagtgatcctgaaggtaatggaattgaaatttataatgataaggatatctctatgtgggatatcagagagagtggacaaattattggtattactgaaagactagatattgacaatttacttgacagccttgtcaacgttcctaataattataagctttctgaaaaaactagtattggtcatattcatttgagtgttaaagatgctaagattagctcaaaactctatcaaaatgtttttggccttgatgagaaatttgcaatcccgacagctagttggattgcatccggcaactaccatcatcatctagcctttaataattgggctggtccaaatctttctaaaaaccaagaagatagacccggaatttccttattgacaattgcttacaatgatgacaacctttttagagatagcttaaaaaaagcgcaactttaccaactgactttccttgaaaaacaagatcattattatattattgaagattttgatggcatccgaattaaagttgttctaaaaccagagaattaaccatcacttgacttttgcctcttcattttacataatgtcaatatgataaaaattttgatcccaactgcaaaagaaatgaaagtgtgtcaaaacattgcatggcctaaactgagtgctcaaacgaaaattataattgattatttttctactttaactgtttcagacttagaggatatctacagaattaatacaagtgcagctcgttgtgaggctcaaagatggcaagattttaaagctaaacaacttactctgaatcctgctattaagttattcaacggtcttatgtaccgcaatatcaaaaggcacaacttatccacaagtgaagcacaatttatggaaaattctgtttttattactagtgctctttatggcatcattcctgctatgacactaatatcccctcatcgtttagattttaacactaaaatcaaaatcaacaataactctcttaaagttttttggcgtgaaaattacgatacttttatgcagtcagatgacattatggtttctttgctttctaatgaatttgaaactgtcttttctcctaaagagcgtcaaaaactaatacatcttaactttattgaagatcgagatggccaattaaaaacccactctaccatatcaaaaaaagcaagaggaaagtgtttaactgctatgatggaaaataattgccaaactctagaacacttaaagcaattacgctttgatggcttctgttatgataatgaactctcagactctaagcaattaacttttgttaaaaaacagacttaagtaactatttatccacaatttattcacacaaaaagcaagagataatcgtatctcttgctttttgacaaacttgtaaggtctaaaaacctctctatatcaaggtttcaaacaatattaacaaaaaataattgttattaacaacttgtggataactatggggatagacagaggataatctgtttatataaagttgattacttaacactaatgtcattgtatatacctttagatttcaaaaatacttgttaaattaacaataataaacgtcaacatcttgtcacagactgtcaaatacttataaacaagttgtggataaacataacttttaatttttatttaaaagttaatttttgacactagagtaaatcatctcgtttgacttgttcataactattgtcaccatcgtttaatccttcccaaatcacgacttcaccttcttttaaagatttttgtacatcaatgattctttgatttgaagatcctctaaattgtagcattaaatttcgcttactttgatcaaacctaccatccactaaaatatcaatcaaagataacatctccaatttatcttgagtctccagcatcatttcttcccaagtataccccgtccatgaccaaatatctttttctggcaattcacgtcggatacgctgaagaagtggcaacaaaatacctgtatttaagaacggctctccacctaataacgttaaaccttggacgtaaggttgttctaaatctgtcataatttgatcttcaagctcttttgtataagggattccggctcgaaaggaccatgtagcagtattataacaccctttacagtggaacatacatccagctacgtagagtgagtttctaacaccttcaccatctacaaaattaaaagctttataatcaatgatatggccatgacttaattcttcgcttttccactccccaggctttggagtattccaacttgcttcttctgacatttctaacctctctattgatatgaaaagaaccagaactaactggtctttttattattatcttaaagtactattttaggttatccaataacgctctgtctgatgaagacaatcttctaaaacaccaccgttagctaatattactgacttgctggcatcattgtctacatggcatgtcacaagtatttcattaatattttttagatgtgcttgctcaattcctagcttcaactgttctttagcataacctttgccacgctggcgaggtcgtatggaataaccaatatgtccacctttttctaaaagagtatcatttagtcttaaacgtaaatttaagaaacctatagcattattgtcattgtcaaaagacacaaactgaatatatggaacaaaattatcaggaacgcctacccctaactccatatttaggttatgatctagccagtcttcaaaatgcatagttggttcataaaaaccaccgtccactgaactactttctttttgaaactctttatacatggctaaaatttcttctttatcttctaacactgggcgccgtaatttcatattgtttcctattccattatcttcaagttaagcattccaaaaggagcattcgctttattaatctggtcacaaataaaatgactcaataaactagactttggtgatataggattgacacctgtagtgatagcttgaataaaagcatcaatcattggttcaaaaccacgtttctctagagtgcttgcccaagaaccaaaaccgatagcacgacggtcaaagccatcaataacagaaagatttgacaaatcatctaatgaataggttacttctggcgactctatttcaattatttctcgacgagaccccgactgcaggttcatgcttgcttctattatctcactgtctgtttctagcgttactgatacttgtaatatcttattcccatcacgtttagtcacaaagtatcctcttttaacaacattatttgtcaaaaatagcgccgtatctaaaggatggataaacatatcaaaaagcttatattgaaaatccgctggtgcattgacagcatttttaaaggtgcgaatatggtttttatcttctacttttttcatttccataatacgtggtgcaaagcgacgattaaaacctgccattaaaaatgttttatgatccttcgccaaatcatacaatgctttagttgaagtataatcttctgtcaaaggcttatccataaaaactggaatacccttttttaaaaaaagctttgctatatcaaagtgagcactagtcgcgacatgaatgaagactccatccaaaggatgctcggctagactatctaaactgtcataagctgtagaagaaccaaaaagcatattaacttcttctaaaatctgtttttggcgtgtaaaaagatgccagtgcacacctgtcacttgacgcatataaggtagataagctttctgtgaaatacctcctaaaccgacaattccaagttgcaacatagcatcctccttctattttttctttgccttttccaaaaattgtttccttaaatcttttagacgtgatttttgattagcattctctccagtagagtgcttctcatggaacttctgtacttgtgcttgccctttgtaatctaattggtatttccccatatcttaataactccttctattttatcttcttattttaacatataatagaccagaggttttaatagaggttttaattaattaccttgatttttaatacttgatccgttcatatgttttacacgagcagagatttccttatgacgaccattaaccatcggacgagcctgtggattacctaaataaccacatgtacgtttgacaacatctactgtcttagggtcgctgttaccacaatttggacaagtaaaacctcgatctgtcggtgtaaaatccccttcaaattgacattggtaacacttatcaatcggtgtattagtacctagataacctacccgatcataagcatagtcccaaactgcttctaaagcttttggattctgttgcaaaacagggtattcacagtagtgaataaatcctcctgatgcacccgtttcaggatagattttctcaaaatctagtttttcaaaaggtgttggattcttacgcacatcataatggaatgaattagtgtagtattccttatcagtaatatcagttactataccaaatttttcagtatctaaacgacaaaaccggtcagtcaagctctccgatggtgtcgaataaactgaaaaatgataatcatactcatcagaccaatctgcacataactgcttcatcttacgaacgatgtctacagtaaatgctttagcttgatggttatcttcccagtcaccaccataaaaaacactcgccacctcatataaaccaatataaccaagagacaccgttgcacggcggtgattaaagagtcgatcaacattgtcatattttcctaaacgttctccaaatgctccatactggtaaagaatgggcgcatttgctgggatagcctctttgacacgttccacacgataaaccaaggcatctctagcaatactcatacgttcattaaatatctcccagaatttatccatatcaccgttagactccatggcaacacgcggtagattaactgttacaactccaagattcatacgaccagatgttacatcctgaccatttgcatctcgccacccttgtaggaaagaacgacagcccataggggctttaaaagagcccgttaagtcaataattttatcataagaaaggacatctggatacatccgttttgtcgcacactctaatgctaattgtttaatatcataattggggctatcttcttctaaattaagaccttttttaagcgtaaaaattaattttggaaaaatagcagtacgatgctcgcttcctaaaccttgaatccgaattttcaaaatcgctttttgaatttctcgttcaaaccaattagttcctaatccaaaaccaagcgaagtaaatggcgtttgcccatttgaagtaaataaagtattaatttcatactccaaagattgcatggcatcatatatatctttttgtgttttagcgcgcgcatagtcttcttgtttatcttcaataacccattcttttgcatcttttaaatgtttttgataatttaactgtgcataaggagctaaaaactcatcaatgcgatctgctgtacagccaccatattgacttgaagcaacgttcgcaataatctgtgaaatctgagcagtcgctgtctgaatagattttggactctcaacttctgcattaccaatcttaaaaccatttgcaagcattcccttaaaatcgattaaacagcaatttgtcatgggagtgtatgggctgtaatctaaatcatgataatggatatcacccttttgatgtgcatttgctacatgagaaggtaacattttcagaccaattgatttccctacaatacctgctgttaaatcacgttgggtattaaacacatcagagtctttattagcattctcattaacaacagtttgatccttattaattaattttccaatagaaaaattgatatctgtagcctgtgaacgctcaaaatcgcgttgggtacgataattgatatattcttgtgcaatagcgtactcattagcttccaataatttatgttcaacgatattttgtatttcatatatcttgatgttatctttaaaacgattgtagatctcagcgatgacatgatctgcaatcatctcaagtttagcctcaactaaaggagacattttgataactttattactagcttttaatagagccgtgtagattttatacttatcaaagctgaccaaacgcccgtcacgtttaatcactttgatatcagattctgtcataaatcgttctctttccaataccatcatgtgaaatatcctccagtgacaattatagcatgcaaagaaaaaaaatcaatatattgtgtcaagttttttgctcagacacaatatattgattttttaatctatttgaaacgatatagaacaaaatgagtgatatttgatagaggaacttcttggtagtgcttcttaatatcagatttcagttcatttggtaacttctcatttttatttaagataaagtatttagccccatgctgaagcagctcgtccttcaaaattttctcattatttttttgcgctgtattaatatgtggcaaaacaaattgagaagcagattttaaccgagtctggctataaatgctagcaactttgtcccaaacataaatcttaccatctctatcaatttttgtagtcaaataatgtgaaatgtcacgcctttctttactaagagtaacattttgataagtattataaactagtaaccctatcgataaggaaactagtaagaggggcaaataatatgttttctttacaaaaaggtctacgataagagatttaccagagaaatactgacgtctatgtgaacgtctgtcaatcactttttggtaaagaatagtaattttattactcgttagcaaaagaccaaatggtaaagcaggtaaaaagtggtaaaggttaaaatctcttgaaaaaatggccattatagcgtaaataataaaaatacaggcaataaagttcaagccgatttgataagatgcttttttacgattttgaataaaatcccatagtccaaagagacaacctgaccctagaaggacaacaatttgaattgctaaactaagaaggaatgagtggtttgtcctagcgaaatacgtaaaggggtaaaaaatagctttgtcaatataagaagagataatctgtagattaaacataaagtaaccaacagtataagcaattaaaatcataccaaaaacaacgcataaaaactgataaaatcctcgtagtgactgcttttgcttaatattggttgctgttaagagaacaaaagagcaaagccaaaaaatcagtgtttggggatctataaatagtgagaatgctgctaaaatgccataaaatataaatgcttcatcaacgatattatcgacacaaaatttaattaaaaaccatagcgaaatgagcataaaaggtaatgcccactgtattgggtacataccaccgaatcctaagacaatattcattatatagaaaatcaacgtcatgcctatcgagacaatttcactttgtgccacataataaactaatttataaaaataaattccagatacatagtaagcaataaactgtacaataagtaaccagatactagaccctaaaaggtaacttagagcaatcgttacatagtataaaaatcctcctgtagcaaaaacatcactataagggatctgtcctttggtcatcatcaaacctgtatagagattctgagtctgcaaaccatttgcaaaataagtcaataaaggatttgcaattgctaagagagttgacaaaacactatatagtaaaattgaaaatcgactagatttcttcattctgatagccgttcgtttactcattgatgggctatttttatagctcactccaattggtttttctaggttttctaccactatttttctcctcatatttacatactaccagtatatcagaaaaccttatttagtcaatttagccaacacttgaccgtaacgaataatatccctaaagtagtggtattttctagacatatattgtttgagaaattcttgttcttctagtgttagctgagtatctgacattaacatcacctccttttactacatcatcactattattattcgaaaaaaaaacgactgaacaattgctcaatcgcttcgatattattcttcatctagaaagctgttgaaaacttcctcaatcatgtcccattctgcatctgaatcttctggtataggctgaaggtctccttcagttccatcggcattttctgtaaatgagtaagcttgaatctcaatttcaccttgttcgtcttcttccgcacctgcaggaacgaggagaacatagtttttgccaaactcttcacgcccatcaatagttaatagaatttcaaaaagtgtttcgttcccattctcatctacaagagtgattacttcatgttgatgttcatggttatgatcgtggttatgattatgtgccattgtttctcctttttatgccgaatgcttaaaacatgcggtctaaataattttgtaagattagttgagctgctaatttatcgataactttcttacgcttaccacgactaatatcagcttgctcaactagcatacgctctgcttgaacagtcgttaaacgttcatcttgatattcaactggaagattgaataattcagtgattttatcgccatatgcctgactagcctctacacgaggaccacttgtattattcatatttttaggtagaccaactacaaatttatcaactttgtactcttttactaactctgctaagcggtcaaaaccaaaatttccagattcttcatcgatcttaatgatttcaagaccttgtgcagtgaaaccgagtggatcactaattgcaacgccgacagttttcgagccgacgtcaagtcccattattctcattacaaatctattccatttccttgtaaataataacgaacgagctcttctacaatctcatcacgttcatatttacgaatttgattgcgagcatcattgtaacgaggtacataagcagggtccccactcaatacgtaaccaacaatttgattgatgggattgtaacctttttcttctaatgaacgataaacagctgttaatgtttcactaatttctactttgttactatcatctaatctaaaacgaacagtttcatctgtaaatcccatacctacaccttctttcctttaattctttcacttattataacttaaataaagtatttgtacaagaaattgataaacactatattagaaaatcaaaaagggagcacaagaaaccaagaagtgattctttgatttctttactccctaccttataggtgatttttacaggttatcgtgtgactctcacttatgcttatctaaagctcaaagtgctgcacgaagacgagcttctgcattttcaacgttacgaatagagcgaggtagaaaagcacgaatatcatcttccttataacctacttgaagacgtttgtcatcaattagaattggactctttaaaatacgtggattttcttgaataagatcaataacttcatttacactcaactcctcaatattacaattgagcgccttagcataacgatttttagaagaaacgatactttcaataccactttcagtttttgttaatatttctaaaatttcatcacgtgttagtgattctttacctaggttttgttctttatatggaagttgatgagcatttagccaagtttttgcttttttacaacttgtgcaacttgaaatagtataaatcttaatcatgtgccttctcactttctatcccatgatagttatagtttaacatagtcacaaaaatcaaacatgggacttaagacctattttttatcaatttactaataaaaataaatagattttagggatttttaagcttatttttagtataaaaataagttccaaccactgtcagaacttattttagttacatttattcaagttcaagatgtatagttgctattttattcctcaatttcaatagcattgtccaaatctaaaacaagatcatcagcttcatttttttcttcaacgagctcagactgaactggcgaatcatcttcagtcattccaaagtgcacgcgcactttatggtcaatttcatcaaaaattgctggattatctgctaaatattttttggcattttcagaaccttgtccaattttctcaccattatatgagtaccatgcacctgctttttggataatatccaaatcactagcaattttaattaactcacccgtgcgagaaataccttcaccatacataatttcgacaaaagcttcacggaatggtggagcaactttatttttaacaactttgatttttgtctctttaccaacattatgatctttatgctcaccagttcccttgatttgagtattaccacgaacatctagacgaaccgatgaataaaatttcaaagcacgaccaccaggtgttgtttcagggttaccaaacataacgcctactttttcccttaactggttgataaaaattgcgattgtctttgtcttgttaatggatgctgacaatttacgcattgcttgactcatcatacgagcttgcaaaccaacgtggctgtcaccaatatcaccatcaatctcagcacgaggaacaagggctgcaactgaatcgacaacaactaaatcaactgcgcctgaatcaatcaatttacctgcaatttcaagaccttgctcacctgagtcaggttgagacaaaagtaactcatcaatattaactccaagagccgcagcataggctgggtcaagagcgtgctcagcatcaataaaggcagcaatcccaccttccttttgggcttgagctacggcatgaagggcaaccgttgttttaccagatgactctggtccataaatttcgacgatacgtcctttaggatatccacctgctcctaaagcgatatctaaagcaagagaacctgaactcattacttgaaccttttgttcagctcgctcacctaagcgcatcactgcgcccttaccaaaatctttttcaatatttttcaaagcatcatctaaggcttttcgacgttcatcaccgaatttcttagtaatttcttctgcttttttcgtttttttagccaatgtcttctccttatatttctatgaatctaggttgattcaaatttagaaatcgttctactaattataacaaatattatatctttaataaagccctacgcaccaagtcaaaagcatgtaaagtactgatatgacggacatctgagcgactcttccctccaatcgatactttaatagaagaaacgccttcaggggttgcaatcccaataaaaactgtacctgcagggtatccttccaactcatcaggaccagcaactcccgttaaaccgataccaaaatctgcttttaaaagttggcgagcttgctgagccattgcctcagctgtaaaatgactgacaactccatattcttgcaattttttcttagggatgccgagaagttgtgattttgcttccatactataggtcgtaaaaccaccattaaaaacttgcgaagcaccagaaaattctgctaactgagattgaaataaccctgctgttaagctctctgcggcagtaatcgttttattttgtactttcaataattctaaaacagtacgtgccatactattattatcaccataaccatataataaatcttttaatttacggttatctaatgtcttaagagcaagtatttctttttctaagctatctaatttaaagtcggcctcatcctgattttcagctttcgttgataaccttaaagttacctcaccaacctttgcatatggtgctatagttgggtctgtctgattcttaattatgtcttctaagattgtgactaactgactctcaccgataccaaagaatctcaatacacgtgaatataattttgtgccattatttgacaaaataggtactacctgctccataaccattggctttaattcactaggcggacctggtaaaaccatatattggactcccttagatgtaacgataccaccaacagctagaccagtaaggttttgtagaggtattgagccttcaaccaattgagcttgtcgttcattatttggcgttctagcaaactgaggacgacttgcaaaaaaaacgatccaattttcgactagctaataaatctactgttaatgatttacctaaaaatttagcaaaagtttgcttcgttaagtcatcctctgtagggccaagtccaccacataggataaccaattgactgcgctgactagctatatctaaaagcgataataaacgttcctcattgtctcctacagctgtctggaaataaatatcaattcccaattctgccattttctccgacaaaaattgtgcgtttgtattaacgatctgtcctgttaaaatttctgttcctacagcgataatttcagccctcacaacttcaccctcttatctattcgaaataatgactacattttagcaaaaaaagtagcaaaagtgctacttaaaacatatcacattgatattacttgaaatcacatatattttcatggtcattaaccatacccgcggcctgaataaaagaatagaggcaagttggaccaacaaatttaaaaccgcgtttttttaaatccttagataagcgttcggataaggtagtacttgcaggcacatcgttgtagttgttaactgagttaacctgtactttattatctacaaaagaccaaatgtagcgatcaaaacttccgaattctttctgaattaatataattgacctagcattttgtcgtgttgagaaaagttttagacgatgacgaataaccctaggattttgtaagattatctctaaatccgcatctgacattgcagctaccttttcaatattatagtgatgaaaaacttgtctgaactcctgacgtttatttaatactgtttcccaagataaacccgattgataagtttctaaacatagtaactcaaagagtacatgatcgtcatgaacagctctcccccactctttatcatggtaagctacatataatggattatctaaattcacccaagaacatcgtttcatgtgaaacctcattacttctaaattatttcatcaacatcttcaaactagatttgatgtattgctccacagtctcgttcgtaccttcaaaaaaggcttttacttttttcaattcagtcgccttataccccaacgctaacaaagcttccatagcttcttcaagattgctattctgctcagagctaaccttacgactagtcgcactctcaccagaagcttctacaaacttccctgacaaatcaaggatcatctgttgtgctgttttttttcctatctttggaaatttagtcaaatacttaatatcactattatcaatggcacttacgagaccttcattgtcatcgactgcaataattgctaaagcggtcgttggaccaattcctgatactgaaattaaattaagaaaaatttctttttcattttccgtatgaaagccaaataaaagatgtgcatcatcgcgaatgacttgatgtaagtagatggtaacttcttgattaacgtaacctgaaaaagagtagggatttgccacatatatcatgtatcccaatccagctgtttccacaacaataaatttagccgttattttactcaattttcctttaatataatcgtacattctattttcctatctcaatatttttcattttggtagcatataagattaaaaccagacctgctaacataaaaatggtcaatgttatttgaacacctatttttcctgtaaaatagctgagcgaaaccatggcacctgctaatacacttgcaacaggttgtgcgatagctaaaaatccagaatatgatccaatttttccctccaccatcatctccgcccttagaacctgactagctggaacataaatcatttcgccaaaggtgaaaaacgtcatggcaatcaaaatagctccaaaagtgtttagagaaatattaaaaagcattccaaaaccacaaatcaagctccctaatattagttgacgtttcaaaggccaattctctatgaatttatttatagttgtcattagtaagacaattaatagagtgtttgtaaagactgctaaactaagcattttagcacctgtgattgtatgtcctaaaatggacactacttcaaaattttgcttaagattgaccgagaaataattatcaacctggagccagacaacactggaaccaattgctcctaaagtataaacaacaaacgctttatccactaaaacctgactataatttttaaaagttcctaaaactcctttatcatgcttgaaggttccctcctgtggttttgtctcatcaaacttgaagtagaccacgaaacaacaaatcgctgaaataataagaagaactattaataattcaaaaaaatggtgatcatagaaaatcccagcaattccagaacctagcattacagcgatgttaaccaaccaataacctatagtgtaaacaaagcgacgattctgttcgttcgtcaaatcaatggtcatagcttcataggcagggaaataaaattggtgagctatttcaatgataaggatacctacaaaggtcaagtgtggcgtaatatgatttggaacatttgcagctatagttatagcccaaccaatggttgccagcagtgaacctataatcacaacttttttcctccccatagcatctgacaaatggcctccatataaggtcgctacaaaccctgatagttgagttatgatgatcaagattcctgtaactagatttccaaaatattgaacataatacattgccataaaaggaaaaatagctgaaccaaccgtaatggaaataaaacgcaataattctcttaactgtagctgttttggcaaagcaaaaaactctttcactttttctcccttcttccctaacaagtaattatcaatattttcctaaatccctgaggcttgtatgattttcttggattcgtttaaacattttctccatatcagcttttgtaaaattaactaaaacaggtcttccatgagggcaattataaggatttttacattgcgctaactgatctaataaatgacgtgctgagtaatcgtctagcgtatggtttgctttaatagatcgcttgcaagacatcataatagccaactctgcgcgatattttttcactgatacttcattagtgagcaacaacatatcacacatttcataaatgccagactctacctcttcttctttcatccaaattggatgttcccttaaaatgaaagtattattaccatacggttccaagaaaataccaacatcttgtaataatgacattttttcttgtaattgaagaaaatctgaacttgaaaattcaaatagaaatggtactaacaattgttgaagactattatcaacctcacctatcttttcacggtaatactcgtattttacacgctcttgagctgcatgttgatcaataatatacaacccaccattcccttgagcaaataagtaggtcccatgcatttgaccaaaaaattcgagctctggaaaagtcgaactttcttccgaatctaatttttcaacaagtttgttaagtgactgtttactactaaggtaatcctgagaatgaatgaagttctcactatcagcttgatctctactagcatactttatattaggagactgcgttgctccttgattaacagagttttttacatcattgtcaactgaaccgtcacttttgtcaaggtttgtaaagttagcaataggttcagatacagtatctgcacctataaaaaagtcatttttagccctatcgtaatacaaaccaggctgttttagtgagaagcttgtttgtataggcttatctacacttcgggtactagttttagctaaattctctaaagcatccggaatcaagtcatattgtttaagactctcagaaattgctgtgcttattaaactcattaattctcgttccttagaaattctcacctcttgcttagtcggatgaacgttgacatctgctagataaggatctatctgaatatcaatgacagcaattggaaatcttccaaccatcaactttgaaccataaccatctagaattgagcggttcaaaagaaaatttttaatgtaacgaccgttaattaatagggtaatatagtttcggttagctcgtgtcaattcaggcaaacttacataacccgaaatttcaaaatctaaatctgcatttgaaatctcaatcattttttttgcagtatttaaaccataaatacctgcaatcgcctgtctcaaatcgccagtcccactagttttagtcatttctttaccatcatttatcagtgtaaaagcaacttccggatgcgctagactgagtctattaacaatatcaataatatgagctagttcagactgtaaactcttcatgtatttcaatctggcaggcgtgttaaagaataaattttcaactaaaatttttgttccacgaggacttgaaacaacttcctgtttttcaatgtttccccctttagcaacaagtaacgtcccttgtttcccttgctctgtagctgtttttatcgtcattaaactaatcgaagcgattgatggtagagcttcaccacgaaaacctaaggtccgaatacgaaaaaggtcactctggcttttgattttggatgtagcgtgacgtcgtaaactgagaacggcatcctcactagtcatcccttcaccgttatccgttatttgaatctttttaagaccagattcttcaacctctatggtaatttggctacttcctgcatctatggcattttcaactaattctttaacgacgctactaggcctttcaacaacctcaccagcagcaatctggttagctaatatatccggtaattcaataattttagacaagttcatccctcctttttttatgattttttgtaactttttttgtgatatcttagccattataccatattcaaaatattaatttgacaataacacaatttttagttgacatcactcctattacctgttagacttagggagcgtaataagttttgaagttgtatttttgtttaacatttttaccttttttattttttacagtaacatttttagaaaggtaataaacaaatgacacaaggtacagtgaaatggtttaactcagaaaaaggttttggctttatttctagcgaaactggaacagacgtcttcgctcatttttcagagattaaagttgatggcttcaaaactcttgaagaaggacaaaaagtaacatttgatattcaagatggtcaacgtggaccacaagcaacaaatatcaatcttgttaaataattaaaaaagagcctaaatgaattatttagtctcttttttgttgcctaaaggctattttataataatttctttaagtcaaatatagcattcatagcttgcattggagttagattcattatatctatcgcttctaactcctcaataaccctacctgcatttgaaggttcttcaaaaagcgataattgtccttgttgcttctcagaatctagttcctcatttaagtcagcagtaacagcttcttgggagggcgatacgatcaactgtactgcatcagcttccaactgtgataaaatatcagttgccctatccaataagtcaattggtaaaccagctatttttgcgacgtgtatcccataagacttatccgcaggtccagattcaattttatgtaagaaggtaacttctccatctctctctaaagtagccacgtgtacattgacaagccttgtcaactgttcagataaatctgtcaactcatggtaatgagtcgcaaacattgtttttgccctaacacggtcatgaatatattctataatcgattgagctaatgccataccatcataagtggctgtccctcgacctaattcatcaaaaagaatcaaagatttatcactggctcgttttacagcttgattcgcttccatcatttctaccataaaggttgattgcccagaaattaagtcgtcagcagcaccaatcctagtaaatattgcatcaaatacaggcaaatcaacttcgtctgccgatacaaaacctcccatttgtgccataataactgtcaaagctaactggcgcatataggtcgacttaccactcatatttggtcctgtaatcaactggatatctgtctgactatcaaaatagatgctattgggaatatattcttgcactcccatcactttttcaacagttgcatgacgcccattcttaatcttaatctgatgttgatcattaaatttgggacgaacatagtgataattttctgcaactactgccaaactctgtagaacatcaacggttgcaatcgtctttgctaactcttgaagacgtttaatataagattctacttgggcacgaacacgcataaaaatatcatattctaaatttgaagattgctcgcgagcttcgagcatttcaccttcaattttggctagttcagctgttccatagcgttcagaattttttaatgtcgctttacggaaaaaatgctccggtactagtgataaattggaattggtaacatggaagtaataaccgtcttttttattataatcaattttaagagtaccgataccacttgctgctctttccttagcttcaatatcagcaatccaacctgtaccttcacgcatcactgttcgataattatccaattgcttatcaaatccagacttgataatgtttccctcagtgatagtagcctgtgcttctggggctatcgccgtattaattaaactttctaattcaggcatagtgtcaattttgttgacaatgatgtcaagctcaggttgattgaaggactgtaaaatcattttaatccgaggaatttgtgataaggtctgtccgagttgcaatagatctttagggttggcttttccgaaagatactcgacttgctaggcgttcaatatcatatacaccctttaaactttctgtgagatcgtttctctcaaaaaaataatcaagaaacacttgaataatatcttgacgttccttgattcgattcatacttaccaaaggcctgtcaatccaagttctcagcattcgagttcccatcgctgttttagtctcatctaacaaccagtaaagacttccatgcttcttgcttgttctagcattctccagtaaatctagactatttttcgttgcatatgacatttgtaaatagtcctttatttcataatgaactactttctgtaaatgactaagttcacgcttttgtgttctatgcacatattgtaaaagtttttccgcagcagatatttccaaatcagttaactgctcatcaatcaaatgaatatcattaagtcgttcgtcttcgtatgataaaagcaagttcatctgcttcgtcagtaggtgatttttttcgtccgtcaattgatatcctactacaatctcacgagcttttaaatttagtatttcactacggacggactcaaaatctgttaaaagggttgcctgaaactctccagttgagacatccatatatgctagaccaaatgtttgttgatcttgcgaatcaatcgctactaagaaattattagcactatccggcttcgttgactccacaaccgttcctggggtaacaacttgcactacctcacgcttgaccactcccacagcttttttaggatcttccatctgctcagcaatggctactttgtaacctaattcaactaaaacgtcaatatactgttgagctgagtgatagggaactcctgccattgggattggcttttctgcgttcttatttcgactagtcaagctaatttccaggatttgtgctgcttttaccgcatcatcataaaataattcataaaaatcacccattctaaaaagcaaaaaagcatctggataattctcttttatatccagatactgttgcattcccggtgatatcgttggcttggccatttctcactcctaactaacggggctggctgccatgctcagctcctcaatcattatatttataaacctactgatagttctttttcaaaaactttggcaatatcttcattttgacaaatcaccaacaaggtgtctgctcctgccattgttcctaaaatctctggcagccctttctcatcaataaagtttgctaaaacgctagcctcccctaaattagtatttaaaactaacataaaacttgctcgcgatactttcaaaatatatgagcgtaaggctgggctaaatcgatttgaagtagctgttgataaactataatatagcttaccttctgggctacgtaattttaaaagaccaatctcacgcaagtctcttgatagagtcgcttgcgtgacatcgattccttcattttttaaatgtaatttaatttcttcttgtgtgccaatctgccctgattggatcaaacgtttaatacgtttttggcgttctattttattcatgttattcaatcctttttagttagaattatgcttaccaaattatatcaaaaaaaattgtctttttcacttagtagtgatatcgtaatcattctgtaaaaaagctataaagtaggctagttctttacagaatgcattatgaatttaatcaacaagttctcgtctatttttcataattatgttaaaatagggtgactatattactaattaaaataggagataccatggatacaaaacatctaattgcgagtgaaattcaaaaagttgttccagatatggaacaatcgaccattctttctttattagaaaccccaaaaaattcgagcatgggagatttagctttcccagcattctctttggctaaaactctacgcaaagcacctcaaataattgctagtgacattgctgaacaaattaaaagcgaccaatttgaaaaggtggaagctgttggaccttacgttaactttttccttgataaagccgcaatctcaagtcaagttttaaaacaagtcttatctgatggttctgcctatgctactcaaaatattggtgaaggacgaaatgttgccattgacatgtctagtccaaatattgctaagccattctcaattggacaccttcgttcaacagttattggtgatagtttagctaatatttttgataaaattggctatcatcctgttaaaattaatcaccttggcgactggggtaaacaatttggaatgttaatcgttgcctataaaaaatggggcaatgaagaggctgtccgtgctcatcccatcgatgaacttttaaaactttatgtccgtattaatgctgaagccgagacagaccctagcgttgatgaagaggcacgtgagtggtttcgtaaacttgaagctaacgatcctgaagcaactgaattatggcaatggttccgtgacgagtcattattagaattcaaccgtctttacgatcaaatgaatgttacatttgatagctataacggcgaggcattctacaacgacaaaatggatgaagtgcttgaactgctagaatctaaaaacctcctagtcgaatctaaaggtgcacaagttgttaacctagaaaaatacggtattgaacatcctgccctcattaaaaaatccgatggagcaactctctacattacacgtgacttagctgctgcactttaccgtaaacgtacctacgattttgcaaaatcaatctacgttgtaggaaacgaacagtctgcacactttaagcaactaaaagctgtgcttaaagaaatggactacgattggtccgatgatatgactcatgttccttttggccttgtaacaaaaggaggagcaaaattatcaactcgtaaaggaaatgtaattctacttgaacctactgttgcagaagctattaatcgtgcggcatctcagattgaagctaaaaaccctaacctagcagataaagataaagttgctcaagcagttggtgtaggtgctattaaattttacgatttgaaaactgatcgtacaaatggttatgactttgacttagaagcaatggtatcatttgaaggtgaaactgggccatatgtacaatatgcacatgctcgtattcaatcaatcttacgtaaagctaactttagcccatctaatagcgataattacagtctcaacgatgttgaaagctgggaaatcatcaaactcatccaagattttcctcgtattattgtacgtgcggcagataattttgagccctctattattgcaaaattcgctattaatttagctcagtgcttcaataaatattacgcccacacacgtattttagatgaagacgctgaaatcagtagtcgtctagcactttgctatgcaactgctacagtattaaaagaatctcttcgcctcctaggagttgatgctccgaatgaaatgtaagaaatgacactactaagactgtcaaatttatgacagtcttaattttttatattataataatagcacaacaagttacaggagaatgccatgccatcagaaaaagaaatattagatgctcttagtaaagtttatagcgaagaagtaatacaagcagatgattattttcgtcaagctattttcgagctcgctagtcaacttgaaaaagaggggatgaactcactcctagctacaaaaattgactcacttatcaatcaatacgtcttaacacatcaatttgatgctcctaaaagcatatttgatcttagtcgcttggtaaaaacaaaagctagccattacaagggaactgctatctcagctattatgcttggtagtttcttaagtggaggaccaaaataaaaatacaggccagacagcctgtatttttatttatcgtaatttcttcgtcgaattttaaaatctgagctaataacttcatctacatttataacagaaataaaagcatctgggtctaaatcagccatgatttctttcacatcacgcacttcacttgggttaagagctacgtacaagacatcatgctctctacctgagtaggcaccttggccccgtaaaaaagttacacccctattaatttcatgcaaaatggttgctgctgcagattctgattctttggtaataatgatcattccacgaacagtgtagcccccattttcaacatttgttaacacttgactaaatacaaagctagctactaacgtatatagcatctgttgtaaattaatataaacaagtgaagacgttagaactatagcatcaataaacaataaggtttgccctaattttattccagatttttcctctacaatacgaccaataatatctgcaccacctgtagttgcaccatatctaaatactaaaccactaccagttcctgctaaaattccagcagctactgcaactaacatcatatcgtttttcaaagggactgttacagggatttgttgccaaaaccacatgaaaaaagacattaacactgtaccatatatagttaacaataaggattttttccctaaaatcctagcccctaatataaataacgggatattaaggagaagtgatgaaagtgctggattaactccgaaaagtgcatggataatcaaagtgacaccggaaatacctccttcagccaaatgattagccatattaaatttgacaaagccgaaagtatagagagccacaccaaaggcaattaaaatagtttcttttatctttgtttttaaatccagtttcaacataggcttaatccttccttattcaaaaaagctaaagttgtttaaacaacttagcttaataacatcataatgtttccttagtggtggctgaccaaaagtcatatatacagttaatcatcatcaacgaatcgtccaataatatgaacattttctgcaacggaaacaaaggcttttggatccgcttttagcattaaatatttaaaatcactaaattcttcacgtgttaatatagttattaaaactgcttttttctcatgattataagtaccttcagcatcattgatacaggttacaccacgatgtaaatcacgatggatacgtttaatgacgcaataaggcttactggtaacaatcatcgcttgcatctttttttgctttgtaaaaatggcatctgtaactctacttgatacaaaaatggtcaccatcgagtacaaagcgtacttccaaccaaataaaagacctgcaaataataaaataataccattaataataaaagaaatactacctacatctctgcctgttttctttctaattgtcaaactgataatatctgttcccccactagaaattctagacttaaagctaaaaccaacaccagctcccataattaaaccaccaaagatagcattgattaagggatcagttgtaagggtgatttgaggcattagttgaatgaagatagagcttacagttactgtgataaacgtaaaaatagtaaatttatgtccaatcttacgccaagataatatcagcaaagggatattaatggcataaaaagctaaagcaactggtatttcaaaagaaaaccagtgtttactgacagctgaaataacctgagctaaaccagttgctccacttgaataaacatgtccaggttgaaaaaagaaattgacagcaacactggatagaataccatacagcaatgaagccgaaattttctctgcatatttttctcgtgagatactttttaaagtgtgtaagagaccaaattttttagcccatacactgataatatattttacctttttttctaaaggggttcgtctagttttcataactttctacagtaagtgataattcttctaattgttgttctgaaacgagactaggagcttgagtcattggatcactagccttattgtttttagggaatgcaataacttctcgaatattgtccttgcctgctaacaacataacaaagcggtcaaggcctattgccaatccaccatgtggtgggaagccgtaatccatagcttcaagtaagaaaccaaactgttcctgagctgattcagcgctaaatcctaaagccttgaacatacgctcttgtgtatctttttggttaatacgtaggctaccaccgcctaactcatatccattcaaaacaatatcataggcaactgcacgtactttagccaaatccccttccaactcatgcgctgtctccgctgttggcaaggtgaatggatgatgagccgacatatatcgtccctcttcttctgaccactcaaacattggccaatcaacaacccataggaaattaaatttagaataatcaatgagttcaagttcttttgcaatgcgtgtacgaagcgctcctaaagtctcgttagctacttcaagactatctgctacaaatagaattaagtcattattctctagctgtaaagcttctgtcaacctaccttcaatagctgtcaagaacttagcaaccggacctgaaatagtattatctgcatattttagccatgctaaacctttggcaccgtattgttttgcaatttctgttaatttatcaatattttttcgagagtacttgtccgccttatctttgacaacaatcgctttaactactgaagcttctgagaacaccttgaagtcaacttctttgacaatttctgtcaagtcttgtaaaagcatatcaaaccttgtatcaggcttatcagacccgtagttattcattgcatcatcatatgccatccttgggaatggtaaagaaacctctaaacctttagtgtctttcattactttagcaatcataccctcaacaatgtcttgaatttcttgatcactaaggaatgatgtctctaagtcaacttgtgtaaactcaggttgacggtctccacgtaaatcctcatcacggaaacatttgacaatttgataataacgatcaaatcccgcattcatcaatagctgttttgtaatttgagggctttgtggaagggcataaaaatgtccttggttgacacgtgatggaaccaaatagtctcgtgccccctctggagttgattttgttagcatcggagtttcgacatcaataaactctaagttgtcaaggtaattacggattgagtgtgttactttcgcacgtaatttgaaattttcaagcatttccggacgacgaagatccaagtaacggtaacgcatgcgtgtatcatcatttgcctcaataccatctttaatttcaaatggtgttgttttcgaggtattaagaatcgataattcttgcacttttaattcaacttctcctgttggtaaattatcattagcttgttctcgtgctgtcactacaccgctaacctctataacaaattcactacggagactttctgcggttgccataactgaggctgatacttcttcaggattaataactaattgcatgattccctcgcgatcgcgaagatcaataaaaataaggcctccaaggtcacgacgacgaccaacccatccttttaaagtaatcgatgttcctatgtgctcactacgaacacgcccagcatacatactacgtttcatctgttttctccatttaaaatattcattccaacctattataacaaaaagcacctaaaaaccccacccattaaggagagtttttaggaactgttttacaatcctaattgtttaagcacagatgaaaaatctgttttaatgttttcaaaactaactttaacttcttgacgtgtttgattattttttaaaccgacctctttcgaatctacttcactgctacctaatgtcataatcactttagcattaaaagtatctgcagacttaaattgtgctttgattttacgacccaaataatcacgctctactttaaaaccctgatgacgtattgattgtgccaaatctaaggcagctagattagcctctgatcctaatacagctatatacagatctatagtattttctattggtaaagaaatcccttgcttatctaatattaagagcaagcgttctaatcctaatccaaaaccaaatgctggtgtttctggtccaccaaaataggatactaagccgtcataacggcctccagcacagatcgttaattcattatcttcaatctcagtgataaactcaaaaatagtatgattataataatcaagaccacgaaccatattagtatcaatgatgtatggaatatttagagcatcaagcatatgacacacagcatcaaagtgggcttggcttgactcatctaaataatctaaaatagaaggagcattttcaactgctagtttgtcttctggctccttagagtctagtacgcgcaatggattttcattcaaacgacgttgactatccttagacaattgttcacgtatgggtgttaagtaatcaataagagcttggcgataggcctgacgactttctggattccctaaactattaagatgaagtttaacgtttttgatacctaaatcttcaaatagatgatgtcccattgcgattgtttcaacatcagttgctggattatttgatccaaagcactcaacgcctacttgatgaaattctcgtaaacgaccagcctgtgggcgctcatatcggaacattgatccaatataatacattttggttggtttttgaacttctggtgcaaatagtttattttcaacataagaacgtacaacaggtgctgttccttctggacgaagcgtaatgtgacgatctcctttatcatgaaaatcatacatctcttttgtaacgatatccgttgtatccccaactgagcgactaataacctcgtaatgttcaaacattggtgtacgaatttcatcataatgatattgtttaaagagattgcgtataacattttcaacgtattgccactttgctgattctccaggtaagatatcctgagtcccttttggtttttgaagtttcataagtttacctcttcgattagttttctctttaaacattctaccattttttcttatattttaaacaagcatatatcatttgctttagtttgatagtattttcaccgtgaaattgtaaaaataaaaagttttgtcaagtaactttactttacaaaaaagatatgttatcatagtgaagttgatgaaaatcaaaacttacacatcgaaaggaagaataagaaaatggcaaaacctgcacgtcacacttcaaaagcgaagagaaacaaacgtcgtacacactacaaattgacagctccatctgtacaattcgacgaaactactggagattactcacgttcacaccgtgtatcactcaaaggatactacaaaggacgtaaaatcgctaaagctaacgaagctaaataatagaagggagataccatgcgcgtaaatattacacttgaacataaagaatctggtgaacgcttgtaccttacttcaaaaaacaaacgtaacactccagaccgtcttcaattgaaaaaatactcaccaaaacttcgtaaacacgttgttttcactgaagttaaataagacatcatacagaaagcctatgaaatcaacgtttctaggcttttttgcttgcttaaaatgtggttttgtctgatttttgtctgattaaaagtatattatctattcaaacatctcctatatccgtcatacttccaagtttttatggaatcactttaaagcaacttttttccacttgcgaatcttagttctaaatgttccgaaaggagctaccgtattaatatgaataaacttataaacttcccagactgcattcttagtcgcactatcagcccaatttctcatatgaggtttaaataggacttcgtcgctcattgaatcaatcatgttacctatagcatctacattatcattgagttgagccgtaagttctttgatggttagactagcgtaggtctcagtaaaatgctgatatagctctccaagttgattccatttaaacgtctcagttggtgttttaacttctaagccactctgttcatctgactcccattttagtatcagggtagtccagccaacctgataggctagattctccgctggtgtcctatcaacctcatcaattcttaaatctttcaacttctcaggaatgtcattgaattcagcaatatattttttatatgattttagtacttcttccttaagttcgtttttatctgaatatgttctcatttctttcctctttaatttagtcaagttcattgtatcatattcttttctctttttcttaggaagtacagcttttataattctatatatcaaatgaattttattcaatcaacttttctagcttttcaactgcccctctcatggtatctttttgcttcttaatcacatggagatagacacgctcaatctccttggaatcctccgagtgtccgacaaattctcgaatagtagggaggtcaataccttcgctagccataatagagataaagctatggcggaacatatgagggatgacatgaatcggtctgccaaagtctagaaagctatcgatatccttatagggcttgcctgctttcttgttatactttgctgactgactagagccacctctcaggaattgtgagagttcgttgtgataaagcggagagccttgtcgattacctgccctaatataggttctagtaaagagataccctaagtcttggtaagtcggactgaattgagcttgaaatttatttctgtcaatatagtgacgtagaatcttctcaacctcagggctcattggaatcgtgcggacactttccttggtcttaaggtctgctcggtagcgttccttttcgtcaagattgagtgcttccatcatatcatccgatttattcttacttgccctctgccaatgaacttttatccactttttctcaaaatcaagcatgtcttcatttaagcctaaaacctcacttggtcgcatgcctgttagaaaaatcattctcaatacatctgcgataagttggttatcaggtcgattagtccagctctctatcaggcggagaacatggttaacctcacttgcttctagatacttctctgctatatcttcacgcttcttgtcctgctcctcactctttgtcagaactcgccttttaaccttattgctggcaatcgggtcttgtgtaagagttatctgtccattttcaactgaccagtcaaaaatcatcttaaggtagatatgcagatttctcgccatgtgcatagaagaagcattgataagattttgaatttcatctgtcataaaggcaaatttcgtgatggacattctggtatcaaagttcggctcaatatagcgattatagatagtaacccttgttttaagggtattattggctggcttgaccctttcatgccatgctttaaaggctttaccgtaaaaatttccatctttatcaaatggcttggcgatttcttctagggttaaaagtttcttggctttcttaggcttaatgcccattagctcggcgatatagtcatcaactaatttattcagttcttgcgtgacctgagtaattaattgtgtgtttttaatatcgctgaccaagagacgttctttcccagaaggtaactttttgctcggtgttgccttggtggtaaaccaccctttactagcacctgtagaaaggtatttcttatgagattttttagtaatagggtgggtgaatcgcatagcgaatttcaccaagacattacccgccttataagggtctggtcgccaagaactgatgataagtactcttgaaccattatctctcatagggactacctacgccatctttgcgacatactgattggcaattttgtagtcaaaccacgccacaaagacttctgagtggataaagacattgccgtgtgttcctttgataccgaaagcgtaagggctgtctttcatctgacgaatgtaactattaagtgttgcaacggtcatgccatgccagagctcatctagaaagacggatttgcggtaccagttacgggttaagtcaaaatcatgttctgtttttaatgttgccattgaattctccttctgttttagttataatcaagttagttatttttggaaaggcgatttgtagcttgctacaggtcgtcttttcttatgccccaataggctgagcttagttgctcttgtttgtactgctgaatgtcagtctcgtctgtttcggttagcttagaaatccccaattcaagtaagtgctggatatagctatctgccttttcttgcccgtgagattccgccttagcgacatagagttttccgagtgttcgtgagacttgtttctctgtccacttctcagaacgttttagggtaggttttgtccgttttacgcttaagaccgtcttttcttgtgtctctagatagtcattccaccattttaccgtctttcttcgccaacggttagaatccttgtccctcgggctgacaaaacggtagtgtccgttaataacttcaaagtaaatctctttgagcggtcgcccctctttaatctgtttggctagtaaatttgctttttcctgccagcacctcagctctgctcttgtccatgataagggcgtatttggcaattcttggtctagcttttgttctaacaatttgttatagacacaccattgctgagtacctctaacaccaatcgtaaccatttcaccgaccttttcaccattttcaagaaggctcttttcatggtaatcaaaggttttagcggttgatatgcagagttgctttttacaataactgtaaatgagtgggacggatagactgtcatcaaagatatcgttggcaatatctagtctcgtaacgttactatgacattcagaaatgcgtttcatcaaggttacccagttattgacattgttttccatatattcttcatactgacggcacccctgccctctcagttcgataaagactcccatctttgattgccagtccttattgaagtaaacctttatctctgagaaggaataatgccgttgatacttgtttatcccccattcattgaggacaaacttgtctttaggaagaatgaggattttctcaatgacatcatctggagccaagcctttaatcgttacggctaaatagtctaacatcactgagttatccatgtctaggctccaataaatttaatatcggttgccactagctttaagccaccccaattccctccaccattattgttggctcgccaaccaagatggacttctggattgacaagttctaccacaagggagtttaacccatccttttcaacggatttagccaacttgtcaagattgtctacaatctccaagcgaatgcccttaaggtcatcagaagaatagcccaagtctttcaaggcttgaattttgtctgtatcttgtacagagcaagtgattttagccacttcatctgtcgcaatgctttcgccattgacatttttatagactggtgcaacccgtgaagaaaggatagtcactttctttggaatgtcaaattgtgatttatctaatttcaaatcaccaacttttatggtttcgtctgttaagttaaattttgtcatgtgtttttctcctgttcataaaagctacgcctacatgaaatctgtcataaatcgttgatatcatgggctttataaagatttttttcgtgaaatttgcttcaaatcgctgaaccccttgcttatcaagggttttgaccacatttcgtgtatgtgtgcaccccctaatagggaacggggtgcaatttcaatttcgatttcagccgtttgccaccttccccacctgctctgggctaccgtattgaccactcgcccagcggtggggtggcgaaccgtcttcatcgtttgaagaaaccaattctcttagatgttttatcccctgtctctttctctaagttctgaattctgacaagaagcacttctaacttctgtttcaactcagttaggtttctttggtaatcctcttgaatttccataaaagaaacttctagctcgtctacaagctctctaatgggtttctgatggtcttttcccttggaactcccataaacgcttagaattgccctctcaagccctaatgaggacttcttatccgcgaccgcttgaaagtaggcaaggtcatcatctgtaaagagatagattttagaataagatttccgacccgttctcactctactttctttaaattgagtaccagtcaagctttcaatttttaatcgccactttttcagtgttgaaactgagttaagaccgtcaaccctatccacaacttcttgataatcatattcattcattagcttacctgtgttttctgattgagaaagtcggtcacaatctgcaaggctctagattcaatcaatcgttcaaatcccgtactcttgataaggtgatagagttctctgtcatctaaatctttgcagtcctctggtttgatgaaaactttctcttgtgtctctggcgagtaggcaacccactccaccatttgtagttcaatacttgtttgattcataattaccctcttttctgacgtttgcatccaactagcatttatccgaaatatctggtataattacagtaattagatttactgtccttgaacgatgtaccagattgttcaaggattttttctaccttcctttcttttttgattgttaagttagctcctttctatcaataatatacgattttatatacgattgctgtaaattttttgaacaatcctaatgctcattaaaaattatatacgaaaacatatacgatgtcaagtattaaccacaaaaaaatgtacgattttataaactactatgttataatggtctgagaggtaacttatgtttgaaatacttaaacctgataaaaaggctgttgggaaaagattgaggcaagtcaaggatgagttaaatttgtcttttacagattttggaaatcgtcttggactaaaaaaatcaaccatcaacgcatatgtaagaggagataacttagcgcctcttgaagttttagaaaaagtatcaaaaatctatggaaaacctgtaggttggttttactatggagaattggaagaatatattgaactttaccttagaaaacttggttatggtacattcctagatgaatatcctgagacaccgttaaagataaaggatgagctttttaggattaaagcaaatccaaaacaattaatcacaactaacgggggagtaaccattggaacatttgagaatcctaattgggaaaatgactttggttacccaaatgaaggctacctagatgatatcttttttgaaatgctttgtgaaactctaaagaactcaattagacaggaagctcaaacctacctaagtcagcaagaaggacttgacgatactaaaatcaaagaactctctaattactttgccaaccaaatctacatctcatatgattttgtcggaaatttagaaaatctttctaaagataaaatcaagcaagaagttaaagaaagctatgaacgtctgcttaaagattcacctcaagcaggtgtagaagttagctatgattccaattacctacttggttttctaataaatacacttgcggatagtcaaacaacaaggcaattactttcagatatgtcacaagcaacagtcggtatgcctttttcacaatttcatgagggacacgaattagttgaggttatccaatctgtcagaccacggctgatagaactttacaataacacgacctttgatgattggactgactgggcggagaaatgattttagaaaggaagatgcaaatggataacaaattcaaaaatatcccaaaacggcatttaccacaaaaactcccatttgactacacgtcaatatatactgacccacaaatcattaaattaactactagggcaaatattgcaatcggtacttacgaaggatttctagagtctatcattaaccctatgctactaatctcccctttgcttagccaagaagccgttctctcttcaaaacttgaagggacccatgccaccttgaaagacttacttaattatgaagctggtaataaagtagatattgagcgtgatgaattgcatgaaatcattaactaccgaaaggctctcttttatgctctagaaaacatttccaccatcaacaacatcgattctaaaggattaccgttatccaatagaattattaaagaaatgcacaaaattcttctagataatgttagaggtagtagtaaaaatcctggtaattttaagagaagtcaaaactatatcggtagtgtatcctcgatttcatacactcctgtccccgcggaaaaaacaccagaatacatgtctaatttggagcaatatatccattatgatgacttagacttattggttcagtcagcaattatccatgctcaatttgaaatgattcacccttttgaagacggtaatggacgaattggacgattgcttataccactattcctgtactatcaggaactactttcttatccaacattttatatgagttcgtattttgaaagagataggtctctttacatatcacacctatcaaacatttcaaaagacaacaactggaaagactggtttgagtattacctagaaggagtgatattgtccgcagaagagagtacaaaaaaagctcaggacatactaagcctatataacattatgaaggaacaagtcatccctaaacttaattctgtttcaggtatccagcttcttgactttatattctcggctccaatctttaaggcagaacaagttagtgaacacctaaaaatttctaagagaactacctatactttactaaataagttaattgatgaaggttatctttcaacagataatgctcaaaggaatagaacctactattgtcctcaacttctttcaatcgttcaataaggtatctcttaatgaagtaatgttcacctctgcttcacttatttcttttttagtgaagcaaaagtcatctttacttctcttatctatttcttaatgaagcgaaacctgttttggcttcacttgttttttattatgtgaagcagagttggatttcgcttcacttagcgactggtaagtgacttatcatttatactttatttttatactgaataaaaggaattttacccatgcccaagaataggataaacaatttcatcaatataggaggcttaatcttagtaatctcttttctactattagtccttgatatagttaatcttccaacgaaatttggttttaatataaagactttaaatattgaaatttggaatatttacgctacgcttttaggaagcgggttaactctgtatggtgtaattataacaattaacagtcagtatgagtcacagatagaggatactaaacggattgtaaagcctatgattaatgtgtcacctgttgacgagtatagctacaaggataagtatattcaatttgactttatattccccaaagcatatccaaaccttttaagaaaggataatattgacactccaaatgtcaccatctctctggaaaatcttggaactagagaattgtataatttatatataggaaattttgaagctacttattttgatgatggtggctattattatcaacttaatccaattttatattcaaaccataaggtacaacttaatcttatgttctatgaaaaaaatggttatcttaaagaatttaatcaggaagataaatttcatttgctcatttctcctatcaaattttcaatctattttcaggattgcttgaataattggtacgaacaatcgtttaaattacgtattttccaccaagttcaagcagacaggtcagatgaagaaaattcactaacagttagtattgaaagagtagagatatattctgcccctaaagaaatttctcccgattcacttccgtggataactaatccaagtaagttatgccagtttgggtgaatcactaataaagcgaccacactcttatccaatttattagcagtgaactaaattttgtctgatttttgtctgattaaaactgatgcaagggcaaaatcactctatttcatcaataattgaaagatttaaaagcccgtaaaatcaacgtttctgaacgtaacaaatattgctaaatcacacattacgcttactgaagttaaataattgattataaaaaagcctatgaaatcaatatttctgggctttttatttttaaaaataaaatctgacaaaaaagtataaatttacctcttaccttcaggtagttagtcattcttttaaaactcacttttttataactgaaaatattgttcttaattttaaaaattcattttagattcattttacgactatatactcagaagtaacaaacctaatccaaggtttgaaaaaagaaagaaggaagtcagtatgacaaactataaaaacaactttaaaaaattcatgagcaataaattatacgtagggttagcttccattacgctacttggtattgggggagctataggagtaagtggagctgcattagcgcataaccatcactcagaacacatgtcttttgaacataagcatgaaggacacgataaacatcacgatcatagagaaaaatactcactaaaaacattaaagaatatctcgacaaaaatcgattataagactgccttagaaactgccaaaaaagaagctcgctcaggctttatttcacaaattgaattaaataccaaaggtgatacacctttttatgaaatcaaagttattgataataaaatagctaaaaaatataaaattgatgctaattctgggaagatcctttcaacaacatcagataatcaactcaattcaaaagatgcccaattaaaacaaccaagtaaagatattcagactgcattacaagctattcaagcaaaatataaaaatgcaaaaataaaagaaatttctcttgcgaataacaaatcaaataagctagtttataaagtaaaactacttgatggaaatactcctaagattgcccaatttgatagtgataaagcatcatttataaaggcaaataagcttaatacaactcataaaaatcacgactaatactagtgtattaaagggaataggacctcagtactccattcccttttgtgatataatggaaaaaagccatacggaggccaaaaaatgaaaatccttgttgttgaagatgagtttgacttgaaccgtagtattgtaaaacttttaaaaaagcaacactacagtgttgacagtgcttcaaatggtgaagaagccttacaatttgtttcagtggcagaatatgatgtgattatcttagatgtaatgatgccaaaaatggacggcttcacctttttaaaactgcttcgcaacaaaggaagtcaagtatctattcttatgttgactgctcgagatgccgttgaagatcgtatcgcaggtctagattttggtgcggatgattaccttgtaaaaccatttgaatttggagaactcatggcccgaattcgagctatgttacgacgtgcaaatagacaagtatcttctgatgatattcaaattcaagatataacaatcaatttatctacaaagcaagtttggagaaacgacaatttgattgatttaacagctaaggaatacgaagtccttgagtatttggcacgtcacagagaccaagtcctctctcgtcatcaaattcgtgaacacgtttgggattatgattattatggagagtccaatattattgatgtccttatcaaaaaccttcgtcgaaaactagataacaatcgagatggatcactaataaaaactaaacgaggtttaggatatgttattccaaagtaaaataaattaccctaaaaagtctagcatcatcactcaaattaccctctggtacagctcttttatttttatccttgttatcggtgtattaattggttcattttttatttcaaaaagcattgctgaaaacaaatctaaaaaaaatttagaagctaaagctgtgcaaatgagtcaagcgttagctaaaggtcatcggtatgaggcttttgaagatggaatattttattcagtctatgaccaaaatggaaaagttatctattctggttttccaaaaggatttaaaagggatttagaccatcaacataaacataaaaagaaattatctctattttccatggagaatcgtacctttcagtatgttgatattccaatttctgggaaaaatcagtggttacgtgctatccgtactgttgacagactggataagcaattaactgaattgttatttagtttgggtatcgttcttcctcttatgttgattataataactgttggtggctatttaattttaaagcgcacttttagaccgattcaagaaattactgaaaccgctcaatttattacccaaaatgaagactatactaagcgaattatcactaaaaataacgaaaatgaattaactgagctagcagctgttatcaatactatgttggcttctattgaatcatcatttgttcgggaaaaacaatttaacaatgatgtttctcatgaactacggactcctgtaacagttatactttctgaaagtgaatacggaaaaaactacgcagaaaatttaagtgaagcaaaagaatcctttgaggttatacaccgtcagtcactatcaatgaaaaaattagttgagcaacttctagaattgactaaggcagaaaatccattatcaattcagttagaacctcttaatttctcaattatgatgaagcaactagtatccgattcgagtagattattagataatacccctatacaccttgactctcaaatcgaagatgacctttggattataggtcaacaaacactactcaaacggctttttgataatctattttcaaatgctattaaatttacaaacaatcatatttctattagtctaagacagtccgataatcaaattgtcttctctattaaagataatggtctaggtatctcagttgatgaccaaagtaaaatttggaaccgtttctatcaagtggactctgctcgaaccaaggatagtcagtctggaattggtttagggctatctttagtaaaacaaatcgctacaatacaccgtgctaaaatatgggttgattctaaacctgatgatggcagtcagtttacgctcacctttccaaaattgaagaaagactagagaaaggaaataaaaaaaacgatagattacacctatcgttttttttatttaacttaaactcaatttattatatctcttcagatatttttgagactaatagctgaaatctttaaagtattaaaacttgtagaactaacaaaccgccaccaaatattaggaggaataaaacaaccggccacacaaattttagccaatgggagtacttcatatctaacatctgcaaggttgccataactagtccagtaggtgctaaaaacaacattgcatactgcccaaattgataagccattactactactgaacgaggaatcccaacagtatctgcaagaggtgctagaattggcattgaaagtactgctaaacccgacgaggatggaacaacaaatcctaacacaaagtagataaacatcataacaatgataaagacagagccactaacatgtgaagctaattttgaagctgtgtaaagcatcgtatctgatatataaccttggctcaaaataatattgataccacgcgctaaaccaatgattaatgaaaccccaacaaggcttgatgcaccattaacaaactcatcaacaacatccctttctccaataccatttgccccagttgctgttaaaaacataataataattgtaatagctaaaaaggaagaagccatggttggaaaccaccatccctgtgacattactccccaaaccatcaaaggaaatgaaataacaaataaacttaaaataattttttgtctaatagtaaagagtgagggtgtatggttagttgtcatgccccatttagcattaaattctactctatcttcataggaatatgaaaactctggattcgcttttatttttttagcataccaatgtagatacaccacaacaaaaatagcacctgcaatacaccctgctgtacgccatgataagccttctgtgaaactaataccagctgcatttgaagcaataacagaagaaaacggattaattgttgaaaatgatgtcccaacagaacttgctaagaaaatagcacctacacaaatgatagaatcataacccatggctaaaaagattggaactaaaataggataaaaagcaactgcttcttcttcaataccacatagagtaccgcctaaaaccatcaataaggaaactaaaaatatcaataaaaactctctacctttggttttctttgttaaagctagaagaccagactcaaaagcgccactctttctaactactcctatcatgcctccaagtaccatgataaataccataatatcaacagcttcaatggttccatttaccatactagtcgtcacggagccaatgcctgctggattttgcttcaaacgtttgtaagtatttggaactgaaactggcttactaatagcaccagaagtaaattctttaattttaattttgacattcatcttatccaactgtgtttgcgttgctggaacatgaactgtcttaccatttggatctgttactactagtttggatgatgctgtatcaaattgtaattttgaataggacccagcaggtatccaccatgtagccaaaaccgaaaagattgttaaaatgaataatattgtaaaggcacctggcattcgaaaacctttactccttttgttttcactgtttgtcattttttctggcatgacacgcctcctctataataaaaatagattgacttcatcagaaaaagtgcaaagatgaaggttaaataatcatttctttgcacttatctgagattacttagttatacgtgttcctaatttcccatctaatgcatcttctaaaccatttaatgaggtgattaaggctgttcctttcggattgtgatctaagaaactcatacaggctattactttaggtaacatacttccttttgcaaactcaccttggttaacgtaatcaatcatttgattctcattaacctctgttaaagctttttgattttctttaccaaattgagtataaacataatcaactgcagtgagaataatcaattgatccgcagctagttctcctgctaacagtgcactagatttgtctttatcaataacagctgcaataccttcataacctcccttattaatgacagggatgcctccacctccacctgcgataactagggtatcattttcaataagtgttttaatgctattaatttcgatgatttttttaggttcaggtgaagcaacaacacgacgataccctcgtccagcgtcttctacgaaagtataccctttctctatagcaatcttttctgatgtctccttatcataaaaggtgcctataggcttggtaggtgcgctaaatgcttggtctgattcatccacctcaatttgggtaataattgtagcaacttccttatttattccctcttgacgtaattcatttaaaaggctctgttggagatgatagcctatgtatccttggctcattgctccacattctggaaaaggaaaattagttccttgaccactctcagccgcaaaattcattcctaaattaatggcaccaacttgtggtccattaccatgacttacaacaatttcgtgtcccttttttatcaaggccaccaatgattttgcagtatgttttactaatcttaattgttcttctggagaatttcctaaggcatttcctcctagtgcaacaacaatttttgccatgaaaattcctcctaatcacctaaagttgctaccataactgctttaatagtatgcatacgattttcagcttcttggaaaacaactgagtgagggccttcaaaaacttcatctgatacttccatttccttcaaaccatatttttcataaatgtcgtatccaactttagtatctatattatgaaatgagggcaagcaatgctcgaaaataacgtttggattttctgtcatattaagcatttcttgggtaatacgatagggttctaaaagagctattctttctttccaaacttcatccggttctcccattgaaacccaaacatctgtatataggacgtctgaatctctgacgccttctgcaatatcagcagtgatttcaatagaagcaccagtagttttcgcaatttcttgacatttagagagtagttcaggatctggctctaattctttaggacaaaccaaatgataagtcatgcctacaatagaagcaccgatcatcaaggcattagcgacattgttacgtccatcacccacatacgtaaagcgaatatctttatagggcttatgtaagcattccttagcggtcagaaaatcggctagtacttgcgttggatgatcagcatcggttaaaccattccacacaggaactcctgaaaattcggctaaagtctcaactgtttcttgagaaaatccacgatactcaataccatcatacataccacctagcacacgcgcagtgtcttttgaggtctcttttttacccatctgactgcctgttggacctaaataagtaacatgagctccttgatcgtgagcagcaacttcaaaagcgcaacgtgtccgtgtagaatctttttcaaaaatcaaagcgatatttttaccaacaagtttttgttgttcaattcctgcgtatttagcacgttttaaatcttctgaaagttttaaaagaaattcaacttctgctgtactaaaatccaataaagtaagaaaactacggttacgtaaatttttcattgcttattgcctcctttttttttatactcttattgtagatatcgctttcaaaaataatcaaaattcatcaaaaatcttcaaaaaaactttaaggacatttatatgctagatatattatcagaaaaacatctagaaagaaggcagcgtattattatctctgcaatagctatcgccttagctgctcaaatcaatatctcaatacttgctgatgggtttattatgaccttatctttgttcattttgcctgtctttttatattttaatgacgacattaatccaattcttctctgtctaggaattacttttgcttctcctatcttcagaggaatcatattaagtatcgctggcgaggctgagattcatcaaataattgaattcgttttaactgatatggcgttttatatttgttatggcatcaccttttatactatttattggcatcgttcctaccgtaataaaggtacttttttcttttctatcattatttgtgattattttgccaaccttgtagaaattagttttctcataaagtttaacaattatactataactatattcgctactttatttgccatagcacttttgcgagcttttattagttgcgctgtggcttatacttatagttatctatcacttctcttacaaaaagacgatcacgaacgtcgatactattattttatgtggtcaacttcagccgttaaaagcgaggtttattttatgcaaaaaaatatcattgaaattgaaaacatcatgaaaaatgcttatttattagataaagagttatccaaatatcatctacctaaagaataccaacacctctctctagatatttcgcgggacgttcacgaagttaagaaagattaccaaaatattattaaaggcttaggaacctattttagtgtaaaaaatgaatcaactatggcattgaaagatatctttcaaattgttttatcttatactaggagtattattcaatttcggcatcaagatatcattattctcgaaaataataaatgtaatttgataatatcaaactattactatttactaaccattatttccaatatcgttttaaatgcagtagaagctattgataaacaaaaaaagggtacaatcagtgttcacacagaagaattagaagattttattaaaattgagattagtgataacggaccaggaatacctgataaaatgaaacacatgattttcaaacctggattttcgactaaatttgatgctaatggtgatatctatcgaggaatcgggctatcccacgtgcgtattttaatggaagagcaatatcaaggaacgataactgtttgtcctaatcagccaaatggaacaacatttacactgttattccgtaaaaatcgatttaagttaggagataatacgtgaaattctatattattgatgatgaccccactatcactatgattttacaagatattattgaagaagatttcaataatacagtagtcagagtgaataatgtctccagtaaagcatacaacgaattgctgattgcagatgttgatatcgtattgattgatttattaatgccaatattagacggtgtaacattagtccaaaaaatctataaacagcgttccgatttaaaatttattatgatttcccaagtcaaagataatgatttacgacaagaagcatataaagcaggaatcgaattttttattaataaacccattaatattattgaagtaaaaagcgtcgtgaaacgtgtcactgatactatcgaaatgcaaaaaaaattaaatacaatccaaaatctcctagaaaatacgccatcatatcaaaagcctataacgactagtaacctcactaaaatccgttcaatactcagttatttaggtattacttcagagacagcctacacagatattcttaacatctgtgaacttttattaaaacaagaattaaattttgcccaatttgattttcaaaaagaactttctatcgatgaacaccaacaaaaaatcattttacaacgtattcgtcgtgccgttaaaaaagctatgataaatatggctcatctgtacattgatgattttgaaaatgaattaacactgcaatatgctaatgcattgtttggatttcagaatatccataatgaggcacaacttattcaaggaaaaagcatgtatggtggtaaaatttcacttaaacattttttcgatgaacttattttacagagtaaaacgttttaagacttgtttaagcatggccttatatactataaccatcctaaaacttttcttttcataaatctccaacaaacaccttgtctaccgcaaggtgtttgtttttgcttctagtttatcgtttctgacaatttaaatgtcagatagttgtttgaatgtctactttatgctaatataaccctaatatcatacgacctacactcgttacgcactagaaagtaaattacatgatttcatttgaaaatgttagtaaatcatatggtgatcataccatcattgataatattagttgccatattcaaagaggagaattctttgtccttgtgggggccagtggcagtggtaaaactaccatcctcaagatgattaatcgtctcatcgaaccaagccaaggcgctattactttagatggggaaaacattacatcacttgatttgcgacaattacgcttagaaactggttatgtcttgcaacaaattgcacttttccctaatttaacagttggagaaaatatagaacttatccctgaaatgaagggctggtcaaaaggtgaccaaaaaaaagccgctagcgaccttcttgataaggtgggtttacctgctaaggactactttaatcgctatcctcatgagctctctggtggggaacaacaacgcataggtatcctacgagcaatcgttgctaaacctaaggtactacttatggatgagccattttctgctttagaccctatctcaagacgtcaattacaagatatcaccaaacaattacagtctgaattgggtattacattagtgtttgtcacccatgacatgaaggaagctatgcgtcttgcagatagaatttgtgttattaaggaaggtaagatagtgcaattggatagaccagaaataattcaaaataatccctctgaccaatttgttagaaccctatttgaagaggagaactgagtatgacaacactaatcactacctttcaagagcgttttggagattggactcaaagtcttattgaacacctccagctatcactactaacacttattttagcaactttaattgctattccactcggtatcatcattagtcattataaaaaaatcagtcatgttgtccttcagataactgggatatttcaaacaattccttctttagccttgcttggtttatttataccttttatgggaattggaactgtaccagctgtcgttgcactaattatttacgctctatttccaattttacaaaatactgtaacagtactgatgcaaattgatgctaatctcattgaggcagcaaccgcttttggaatgacacgttgggaaaggcttaaaaagtttgagttagctttaagtatgcctgttatcatctcaggcattagaactgcctctgttatgattattggtacagctacattagctagtcttatcggagctggtggccttggatcatttattttgttagggattgatcgcaacaatccttctctaattctcataggggcaatctcttctgctgtcttagctattatatttagtggtttaattggattactagaaaaggctagattacgaaccatagccgtttctggtatacttttactagcaggcttaggactatcctatgctccaaaatggatgcctggaacaaatactgcaacgataactgttgcagggaagttaggaactgaaccagatattttaattaatatgtacaaagaacttattgaggatcagacagatatcaaagttaagcttaaacctaatttcggaaaaacaactttcttatatcaagccctaaaatctggtgatattgatctttacccagagtttacaggtactattacatcaagtttacttaaaaatcctcctaaagtaagtaataaccctaaacaggtttacaacttagccaaaaacggtattttaaaacaagataagttgtcacttttgtcacctatggcttatcaaaacacctacgctgtagctgttaaaaaagattacgctgaagctaatcaactcaaaaatatcagcgacctaaaaaaattagataaactaaaagctggtttcactttagaatttaaggatagagaggatgggagtattggtttacagaaacattatggtttaaaccttgatatctcaaccttagaacctgctttacgataccaagctatcaatagtaaagatgtcaatattattgacgcttactctaccgatagtgaattaatccagtatcaacttcaaattctcaaagacgataagcatctatttccgccatatcaaggagcaccgctactaaggcaagatacgattaaaaaataccctcaagtaaaaaaagctctcaataaacttgctggtcatatcactgaaaaagaaatgcaagaaatgaactaccaagtagctgtaaagcataaatcagcagctacagtagctaaacaatatttaaaagcacatcatattataaagtagattcaagcaatcaatggtattaaatgatttaaaaagagcatgtcgcatgacatgctctttttaattgccaaataaagcttatttaacaatcttaattttactatcttccattaatagggcacaaatagcacaaattaaccaggacgaacgagaacaagaaatataacgttccgaccacaatggtgtaaacttcttcttatacttgtgtaaaccattaaatgagtagaaatgactaccgaaatgatagacaagatacgccattctctctttagcaaaacttgtttcaacgcgaccaactcctgataaaggtgccatccccaaatcaaaatagtggtatcccttctcttgataataagagaataatgataaaaagaggaaatccataacgccattcggaattttctgtttatcgtgacgcattaaatcaatagagataatactcttttcatagtttggcataatattagcaaaagcaacaacttcgtgttcagcattttttaccaaagctattggggcttgttggaaataatctttattaaaatatcctagtgagaaacctttttcaggacgtccttctaaccaagtattagaaatctcttccaaactatttagtagctcttgactatgtggcgattgtacaacttcgaaatagaaaccatccttttcaactctatttagggcatttctgaaaggtttgtacttattccctttaagagtaaacgtttctaaattaactaaagcatcctcaccaactttcataaagtcaaaaccatactcatgtaaaagtagtgtcaacttctgtccaatactgtaaaaaacaaggtcatagtctagcttatcagcatcatcaataaacgattcaatagcttcacgaatataagtgtcatcaccggctggttcccccataataagacatttattattgacaattacaaattggaacgcaacgcaatcttctccatttttttggtaccagtagagccttttatcatttaaaaaggctaaaccgctatccgaagaaccaccgtaagcttgaagtagttttttataacgatccacattgaacacatcaccaatctgacaagattttccttgtaaaatcttaaccaaacataaataaacgagagtaagaatcaacgtagccaatgctatcggctcccatgctatgatataatgcaggcgttcaatactaccacctgtaatatgagccctgatagggaatagtagtcctgcaatataaaatagaactcccattaaactaacgataatgattccatccttaatacgctcttcccagctataaataaattgttttttatagagagttggcttaatgactaataagcctaacaatagtaaaataaaccagaaagatagtcgccaactaatatgacctaaattaagataaaacaatgtcaaagtaatccagataatagcaattggaaaagcatttttcactttttgatcaatagttctagctaagagaataaaacaaacccccagcaataaacctggaaactgccataacatttgttcttgtaatgggtccaagcctagcttctgcaaccacataatataagtaatattttcaaaaaatgctgttgaaaatattaagaatgcacctaaaatacgcatcaaatggctcaccatggtttgtagaacagttgatactaactctttcgggacattttcataacgttgatttatttgactacctaaataatggataaagaaatagatacctgcaaagaatggaataatatagtaggctaaacgataaagtaataaccatgcaaccacagtttctttaggtagtccctcggcagcaaaccctgtaaatagaactaattcaaaacttcctaatccaccgggaataagggatacaatcccgacggcacaaccaatacaaaatagtggtaaaattttataaactggtagatgaatgcccattaaataaccgataattataaatgctgcggccgcacatccccattcaaaaaaagaaacaacacctaattttatacgagtactagatggcatatctccgaaataatggcttcctttatgaccagaaatccaataaataacaggaaaatacatactagcaccaattaataccaaataatagtaatcaacactagctttggcatgaaaaatatggctcatgattaaggcaatcacactaataaatgacagaccagaaataagatagggtaaaaaacgagtcacttctcttaggtcactcttctcttgaccttttttaccataaaaagccatgcgcaacccaatatcgattaagccaccgaatcctgacaagttattaaaagtgttgatacaccaactagtctgtaaaatataccttttgcttttatctgtacgtaaaagtccattcagtacaaagtcatatccggttgtcggtaagacagcgataacccccacaaggataattaagaaaagattcattggagataattgcccaaaaacactctttagttgctcaacagaaatagttcgtttcaaatgaatcatttcaacaataataagcactaaaacagatataaaaaatacaattttaatcacagaagtcagtgatttgactttttcaattagctttttcaacaatttctcctttcaacgtatcgttgataaacttttttgcaataatattaaaaacatgggaatcttgcttaataatgtgatgcccaaagccaactaaagaataaaactccccccttggaaaataagaagcaagtttcttagaatgatttaacttaattatgtccttatttccaaccaaaaccattacaggagttgacacatgctgtaaatcagctggactaatcttcaaatcctccaacataagcgaaataacttgagctttttgcctcatatacggaaagagtttccctaaatagtgaaggaatttataggcaatccttactaaaagaatatcccaccatcgctgaccatgaatagtcaggttccctgaattaagcaaaagccctctaaccatacctggaaacatcgtttgaaaaactaaagctaaattggcaccatcgctatggcctaccaatataactttatcaatctctaaatgaactaagatatcctttaagtcaactgctatttgcctgaaactaatggtatttagctttgcatgacttttgccatgccctctactatccataacaataacttggtaatacttagaaaaatatgctatttgcttatcaaaatagcgactacttaagctattgccatgtaaaaaaacaatcggttgaccttgaccaacgacacgataataaatatctgaaccatctttagtatgtaaccagttctcagtcataatcaaagtcacctctctttgaattcgtagttatattatactatttttaaagacaaattacttaaactacctgtattatgagaaaaaaatgattactaaaagccgttcaactaaatcgaacggctaagtagtattaaaataagaatgttaaaagagctaatataggtaaaccaccctgttttaataagatttttttatcaactgtcaaagcaccataaatagcaactagcaatacattgattaaaaaaacagctacaatttcttgattctgtgaaatatataacccataaaggaggaataggccaatcaagccgttgtatacaccttgattcttaaaaagtttaataacgggtaaatatgacaactcttctttagacatactaaaaatcttcccagtcatatttgactgggtggctaacgtctccaaatacataatataaaaatgttccaaagcagttaatgttgcaataattattgttaaagtagacatatcttctcctcctaaatactttgacataccatatcatactgttagtctatcactagatactttctattaatcttcttgtttacgataaataagaagagcaagtatcatcgatgatactaaaaagattactagcattctccattgatggttaacgtctcccgtcaacgagatggtctctcttaatcctgaaacagagtaagtcatcggtaaaaatggttgaattgtttgaaagaacttaggactcaattctattgggtaagttcctgcgcttgaaccaagctggaataataatattaataacgacaagaaggaaccatacctattatcccatcccactaaagcagttactaatgccatcaaagtccatgctgtcaataggataataaagtaggtttttccagggtaatctggtttaagacctatgaattgaactgcaaaaaataagatagttgctgctagagttgcaatgaatccattgattaataatttatttttagcccaactaaaacgattagctggctctttgccagataaagctttcgcaaaaataacattggctgataaagctaccaccatcaacgcaactgaaatcatgtatggtgccattccaacaccattcgtatcaacgctatcataatcttcatgcttgatagtgactgggctagatactgcattggcattatctttatttacagaaaccatggacaactggtccccagctttccccaaagaacttgataattgagaaacaccacctgacaactctgtcaacccatctgtcaactgatgtcctcccccagcaagcttattagaaccatctgcaattctatcagaaccactagctaattgccccgctccgtctctcaattgatccgatttactatctaaagtttgagctccctgacttgctttttgtgttcctgaaatcaattgattggatttactatctaaagttactgcacctttgcgtaattgccctacagcattcgtataatccgtgattccttttgtcaaggtttgactaccttgatataactgcttagtagccgttggcaatttttgaattttatctaaatctgagatagcttttaatactaaattgttagctgttcctgacaaagtttgaagattttgtgatccattattagaaggggctgaactagatgcttcactaagcacagttttcatattttctatatttgaagaaatatttgctgcaattgtctcagctgaagtaggtgttccagtaaccgctgaggtgatttgagattgttgttcaggggttaaacttttaaaagctgacgttgattgtaccgcagtcatttgcttttgtttatcagcagcagccgtattcatcaaagcctttgtacttgattcaatagttgataaaaaattaaataacttactattagtatcgctatcagtagttgctgtcgattgtaaatttgtaataatctgatttagattctttaatccatctgaaaggttctgcaaagtacgttcttgctctggttttagttgagttgcttgtgacaattgttgtaaaccatccgtcaacttttctgatccttccaccaatgcttgagacttatcatctaatttttgactaccttcactcaacttatgcacacctgttgtgtaagcagtaacaccatctgataatgtttctaacccgttagatagggtccccacaccatctgtataaaggtttattccactatttagtttattagctcctccagaaaaagtttgactagagcttgctaaaacatctaaattacttgtcaaggtttggctcccatcctgtagcttattagaaccatttaataattcttgactcccatcagcagctttattgatacctgttttcatagaacccatatttttaaaaactgattcagtataagtccctgtaatagattctgctacctcatcttttagtttattagctgctgtctcactcatttttgaagctacaaaactacgccccttagtagttttataagtaatatttaacctttctggtttttctgtcatgagagttgtcgcttttctagaaagatctttaggaaaggtaataaccatataatagtgacccttttctaattctttttctgctcttttagctgttgtaaaatggaaatctaagctatcatttttagacaaattgtcctccatatctttgccaattgaaatagtttttccatttaatttagccgatttatcttggttaacgactgccacaggtaaatttttagtattcccataaggatcccacattgagcttagaaagataacattatatagcgttggaatcagtgcaaccccagccatcgtaatccataattttgggctttttatgattgcttttaattcgtctaacattttttctcctattttggacatattgttcatttttttgataaaatatattatacagtgatgatagataatttcaagataaaaatctcgtttttggacactgtgtttaaaaatgtacaaaaatattaaggggtaattaatatggtaaacgatacgaggagagaaaaaacaaaaagagctattgaagcagctatgattacgttattaaaagatcagagcttcgatgaaatttcaacgattaatctaactaaaacagctggaatcagtcgttctagtttttatactcattataaagataaatatgaaatgattgatcaataccaacagtcactcttcaataaagtcgaatatatttttgatcgcaatcaatttaaaaaagaagatgccttgctcgaaatttttcaattcttagatagagaatcattatttgctgctctcttaacccaaaatggaacaaaagaaattcagacctacatccttaataaattacaattaatgctttctaaagaattacctgtggtcaatccagatgcaacaaagtctgatatcaaccgtttgtattatagtgtctatctcagtcatgctatttttggagtctatcaaatgtggataacacgaggaaaaaaagaaagccctcaacaaattacacaagtgctactcagtttattacctcaaacttaaaaccagccttccttataggctggtcatttttagttaggtttattttatcctcattataggatagcaacactaataaggactgacattataaatgacgatacatttgagaagacatatctaaaaattggcctacaagctcgttatgttctcctataaaatcaaagagctgatcctcactcagtacaccgcatttgagattattttctgtttgttctgatagtctaaaccagtcttcgctaccataaaattctcttaatttcacgtaatcttcatagtgcttttgaaaatcatctatagcttctactaatgcattgattctaggtttgaagctatcatacttctcttccatttcttctatttttaatctatcatttagattcataataaaatctccttagttatataagattcgacgagataagttatcattctcaagtatttgtaacgttaactctactatatcctttttacaaagtaaaaaattactcattacaaactgacagtgttgatttttattctaatgttagtttaaaatctttttggttcattaaatataatgactcactaaaaagtatatagcaaaaaaagcctataaaataggcttttaaagtatgtaatgtaataattaaagcattttgttgtagaattcaacgacaagtgcttcattgatttctgggttaatttcatcgcgttctggaaggcgagtcaatgaaccttcaagtttttcagcatcaaatgatacgaaagctggacgtcctaaagtagcttcaacagcttcaaggattgcaggtactttcattgatttttcacgaactgaaataacttgtcctggagtaacgcggtatgatgggatatcaacacgtttaccatcaacaaggatatgaccatggttaacaaattgacgagcttggcgacgagttgttgcaagtcctaaacgataaacaacgttatcaagacgacgctctaaaagaaccataaagttgaaaccaagagttccttcttttgctttagtagcttgtacgaacaagttacggaattgtttttcaccaagtccgtatgaaaaacgaagtttttgtttctcagctaactgcaagccatattctgaaagcttgctacggttattaggaccgtgctgaccaggtacgtagttacgacgtgccaattctttacctgtgcctgtaagtgataaaccaaggcgacgtgattgtttccatgatggaccagtataacgtgacatctaaatgtcctcctctaaaataattgaggaaataacgatttaaaaaatcctgattcgtgcaggggattttcgcctaaacagcaaagggtactagattagttaaccacctgttgacgagcttcatatttttctgctgttatttcacacaagctatattatatcatgaaaataatattgaatcaagtttttatgtctcttaaaccttaaatacaaatagacatctaataagtatttccaattataataagaaagattcttaattctaaccaccaatagagaattagtaaatttttttatagaaacaaaaaacctcagtcgaggttttcatactattctgctgactcgtcatcaaaataacgaattaaagttttctcagttaaaatatctgaataagtgtaagactctacataagtattatcaattgctcctggtacagctgcagtatccttatactctacgataaacaaagatgggtaaacttcaattaggcgcccaattttatttttttccctcttacgaccattttcgagagtaagttcgaccatctgtccctcatgtgacttgatatcttcttttatttttttcatttttgcaacatctgcaaatgcatcactcatattaacatctcctattcttcaaattgagctatactagaaaatttattatattccttttgaaacattaattttactgtcccacgcgcaccagcacggttcttttctaaaataacctcaacagtattatcttctacaatttcctctgcttcttcgccctctctacgataataatcatctcgatataagaaagcaacaatgtcagcatcttgttcaatcgatccagattcacgaatatcagataagaccggtcgtttatcctgcctttgctcaaccccacgagagagctggcttaatgcgataacaggaacctttaattctttagctaaaatcttcaactgccttgaaatttcagaaacttcttgctgacgattttctggtctagttcctgaaattaattggaggtagtcaatgacgattaaacctaaaccatcatcaacttcttgagataacttcctagagcgtgctctaatttctgtaattttaatcccgggcgtatcatcaatataaattggcgcatccgccaaagctccttgagcaatcgttacattattccaatcttgatccgtcaactgaccagttcgtaaactatgagaatcaaccattccctctgctgccaacatacggtcaactaaactctcagcccccatttcaagtgaaaaaatagctacaggtctattttgtttagttccaacattttgagcaatatttaaaacaaaggctgttttacctactgcaggacgggccgctaagatgattaattgatctggatgtaaacctgtagtaatcctgtctaaatctctaaatccagttggtaaacctgtgacatctgaggtttgctgtgaacgtaattctaagttttcgtaattaacttttaaaacatcagatatctttctaaacccgctacgattactgtgttcgttaatatcaactaaagccttctcagcggtggcaataatttcatcagaatcatttccttcataggccatgttgacagtatctgtcaacttagaaatgatatctcgcaacatggctttctcagaaactattttggcataaaactccgcattagcacttgttggaacactattaactaattcaacaatatagcccaacccaccaatgttttgaagatcaccttggtcatctaaaatatttctaacagtagcagcatcaattgcatcatttctatcagctaaggtaatcatcgctctgaagataactttgtgtgaatatttataaaaatcatctggacttataaattctctcaccataatcagtttctctggtgagataaagatagatcctagaacggcctgttctgccaacaggtcttgaggttgtactcttagctcagatacttctaccaaacttcattcctcctgacttgtcaacctttatcatctctcagtttacgcttctttgatatcaagcttaatctgtgaagaaacctgtttatgtaattttactggtacttcaaccttaccaatcgctctaatagtatgatctaaatcaatatgacgtttgtcaattttaatgccgtattgtttttgtaactcttcagcaatctttttggctgtgatagaaccaaacgtacgaccatctggacctaccttttcaataaattgcactcgggtagtttcggattctaattgtgttttcagctcctttgcctgtgctaaaatttctgcttgtgctttttcttcggacttttgttttccttttaattcaccgatagcttgtgtcgttgcttctttagctagattcttttttaataagaagttttgagcataaccagtaggtacttccttaacctcacctttttttcctttccccttaacatcttgtaaaaaaataactttcatctcaattaatcccttctattttcgactgtactattttctcttaaatcttcgtcaattatttccagtaacatacgtctaacttgctttacagacttgtcttgtatttgacaagcagcaaaactaaaatgtccgccaccaccaagtttttccataatacgctggacattgatattatttctactgcgcgctgaaataccaatatttgaactgtttttagtaataacaaaagtagcctcaatacctgccattgtcaacatggtgtcagctgctttactagctataacatgcgagtaaactttatgttcttctccggtagcaacaatgatgttatcataaatacgctcaccttttaaaatcaattcattaattaaacgatattcatcaaaatctgtagctgatattttttgaatagccatactattactacctaaaccgcgtaaatagcttgccacatcaaaagttctactcgttacattagatgcaaaatttcttgtatcaagcatgataccagccattaaaatacttgcttgactgcggcttaatttatctttagcttgttgaaattgaatcaattctgtaactaattcgctggcactacttgcgccactttctataaatgaaagaacagcattttttggaaaatcttcatctcttctatgatgatctaccacaataacatctgcaaacttgttaaagaattccttagataaggttaaagctgttttagaatggtctaccatgactaataaagaattttgagtaattaattcaaaagctctctcaacacttacgagacgtgtttcgccgtcttcttgcaagtaatcaattgctctttcaatatcagaattcatgtcatttgggtcataaactacataactggcattaacaatattactagcaaaaaattgcatccctacagatgcacctagtgcatccatgtccaatttcctgtgtcccacaataaagacactatcaactactttcaaacggtcagaaatagcagtcatcatagctctggtacgtgttcgtgaacgtttaatagttgaaacagcaccaccaccaaagtaaagtgcttttttactactatcattttcacgtactactatttgatctcctccgcgaacgagtgctgtattaagattttctaaagcaatttgcccaatttgattatggttaccatcaccataagaaattcccatacttaatgttaatgataaatggttttcctgagcgcgttttcgaaactcatttaaaatatcaaatttatcttttatcaatgtatttaaaacgctatagtcggtaaaaatatagtatcgatccatattgacacgacgataaaaaatatttttagactgtgtaaaatcagaaataaaactagtcacgaaggcgttaatctttgacatatcagcctctaacatagtatccataatatcatcgtagttatcaatggaaataataccaataactggacgtagcattgaactatcatagtttcttctattccccatgaaattatcgaagaaatagaaaacacccgtctctgtatccaaataagctgaatatttgttatcaccgtattcaaatgattgcccagccgttccattacgtctactagtaatgatatctttaacagtagcagactgaaaatgaccattatccccagtaaaaatcaattctgcataagggttaaaccactcaatatcatttgtttcaagatcaaattgtataacaccaactggcatttgttcaagaagactcttaagagaaacttctgtttgatcattaagtaattcaatttgttcaacttcagatagttcataagttatcttttggtaatataataaggcaacaacaaaagataaagcaacaaaaatagccaataatagagccgtataggattgaaataacctaacacaaatagctaatagtccaaataaaatcaggcctattaaaactaaatggacggttgcaaaacgaaatcttttcattaaataacctcttaagacctaattataacacaaaacgcccctgataaacaggggcgaacactattatcaattgatatttttacgacctttttgtcttccttcaaggtaaaccattaaaatactaatatcggctggattaactcctgaaatacgactagcctgacctagcgtttctgggttaatttttttgaatttttgtctagcttctgttgcgatagaatcaatgtcgtcccagtcaatatgagggggaatacgtttttcttccattcgtttcatttttgcaacttgatctaaagcctttttaatatagccttcgtatttaatttcagtttccaaaagttcaataaccttactgtctaatggctcatcagcacaaccaacaaaatccgttgctactgcatatgtgatttgtgggcggcgcataaattctttggcagttaaagcatctgtcaaaggtttaaagcccaattcttgaatccgtttatttgtctcagaaactggctttaactttatagagtctaaacgttctaattcattttcaaattgcatttgacgctttttaaatatcgcataacgctcttcatctactaggccaatctcataaccgatttctgttaaacgcatatctgcattatcatgacgaagaatcagacgatattctgcgcgacttgtcaacagacgatatggttctagagtccctttggtaactaaatcatcaatcatgacaccaatgtaagcatcacttcgttttaaaataagttctggcttcccttgaactttaagagcagcgttgatcccagcaaccaacccttgaccagcagcttcttcataacctgaagtaccattagtctgtcctgcagtaaacaaaccagcaattacttttgtttcgagtgttgctcttaattgatgaggcaatacaatatcatactcaatagcatagcctgtacgcatcatttcagcattttcaagcccttttatagaacgtaataaatcaacttgaacatcctcaggaagactcgttgatagcccttgaacataaacttcttcagtgtatctaccttctggttctaagaagagttggtggcgctctttatcagcaaaacgcacaattttatcttcaattgacggacaatatctaggaccaactcccttaacgattccagaaaacataggagcacggtgtagattttgattgatgatgtcatgactcaaagtattcgtataggtcaaccagcacggtacctggtcagtaatataatcttcatccctagacataaatgaaaaatgatttggttgctcatccccaggttgtatctctgtcttttcataattaatagaggaggcttttacacgaggaggtgttccagttttgaaacgaccaatttctaatcctaggtctcttaaattatctgccaatgtcacagaagctaaactattattagggcccgaggagtacttaagatcacctaatataatctctcctcgaagagcagtacctgttgttataacaacagattttgctgaaaatttctgattagttgctgtacgaacccccacaacctttccatcttcaacaagtatttcgtcaatcatagcttgtcttaaggtaagattttcttgcttttctacagtttgcttcattgtttgtgcatagagggctttatcagcttgtgctcttaaggcacggacagcaggccccttacctgtattaagcattttcatttgtatataggttttatcaatgtttttacccatttcaccacctaaagcgtcaatctctctgacaacgatacctttagcagagccacctatagaaggattacaaggcataaatgctaacatttctaagttgatagtggctagaagtgtcttacatcccatacgactagcagctagactagcttccacacctgcatgacccgctccaacaacgataatatcatagttttctgcaaattatgtgtcattttattcctttccaatttcaaagtctaattcattaaaacacaaaaatagccaaaactctcgaaaattgtacgtcaaaaagacttacaaattccatgagctttgaccatcatagttattgttaaatttattttagcatttatcttttaaaagtcaaccagaggggataggctatgttaaatgaaaaccaatttttatgcctgttattagcatctctatcccgatagtcatcaaaataagtcccatcattttggtgattatagtcattgcattttttccaagaaatttagtaatttcgtttgcacttattaaaataacatacattatcacacataatatggcaaaagcaagtatagtaatgagtttgccagataaaccaccacttgataaccccatagcagttgcaatagtacccggacctgccaaaaggggcattgctaatggtgaaactgccacattcattggatcatccttatgctcctctaggtttttattggttggtgaatgtataccattaatcattttataacctataatgcctaccaatattccaccagatatttttagggcggctagggtaatcccaaataagttaaaaagtaagtggccacttaatacaaagattacaataatgacaaaagcaagtaatactccttttgctgcaatccgacgtgaaatcttctgatcatcatcagctactaaagccataaaagctggcaaattagaaatgggattcataatggcgaaaaaagccatgaaagctaaaataaattttgaaatcatacgattacctcacttaataattaagtgtcaattaaatgtattgacagattttatcatcacgataagcctgatcaatcatcccaccgcctaaacattcttgttcattataaaaaacaacagcttgacctggtgtgattgctcgttgtaaatcatcaaacacaacccttgcttgattaccttttacgtaaactgtaactttactgtcaggttgacgatatctgaacttagctgtacattctagcttaaattcattaggcatatcacgtgtaaagtggatttcagaagctgtcaagctagttgacatcaatgagtcatgatagaaaccttgacctacataaagaatgtttttacttaaatcctttccaactacaaaccaaggtttattatctccaccatgttgcccaccaataccaaggccccctctttgaccaatagtataatacattaaaccagcatgttcacccatgtcacgaccatcaacagtcatcatacgacctggttgagccggtaaatattgacccaggaaatccttgaaatttttttctccaataaaacaaataccagtagagtcttttttcttagcggtcgcaagtcctgcttcttcagctatacggcgaacttctggtttttgtaaatgaccaagtggaaataacgttttttgcaattgctcctgagataattgacttagaaaataagtttgatccttattattatctgctcctctaagcatatgaactattccgttctcatcacgtgttacttgtgcataatgacctgttgctacatagtcagcacctaatgtcatcgcataatctagaaatgctttaaatttaatttccttattacacataacatctggatttggcgtacgacctgctcgatattctgctaaaaaatattcgaaaaccctgtcccaatactctttttcaaagttgacagagtagtatggtatgccgatctgatcagcaacagcagcaacatctttataatcttcagtagccgtacaaacaccaaattcatctgtgtcatcccaatttttcataaaaacaccaataacatcataaccttgctcttttaaaagcagggcagttactgatgaatcaacacctccactcatgcctacaacgacacgaatgtttgaattatcagtcataagaattctcccatcaaaaagttttatttttaacttaggcttgaagggccaagttgttcttagatcaatcatattgactaagaaacactataaaagtgcttatatattatagcactatttgttgtcaagttgtatgtttttgttgtgataaatatttattacattgcagtttttttatctttttatgatattttttagaaataatctgttataatgagaatgtacaaaaatcacgaggaaaaactatgaaacatttaaaatttcaatcggtcttcgacattattggtcctgttatgattggaccatcaagtagtcatactgcaggagctgtccgcattggtaaagttgtccattctatttttggtgaacctagtgaagtaacctttcatttatacaattcttttgctaaaacttaccaaggacacggtactgataaagcattggttgcagggattctaggaatggatacagataatccagatattaaaaactctcttgaaattgctcatcaaaaaggaattaagatttactgggatatcctaaaagatagtaattcaccacatccaaatactgcgaaaataactgttaaaaatggggataggagcatgagtattacaggagtgtcaattggtggcggaaacatccaagttactgagttgaatggattctcagtttcattaacaatgaatactcctactttaattatcgttcatcaagatatacctggcatgattgctaaagtaactgatattttatctgactttaacattaatattgctcaaatgaatgtaacacgcgaaagtgcaggagaaaaagctatcatgattatagaagtagattcacgagattgtcaacaagctgtcaaaaagatagaagctattcctcatttacacaatgtcaacttctttgattaagagaaagggtaactatgttttatacaattgaagagctggtagagcaagctaatagccaacataagggtaacatagcagagctcatgatccaaacggaaattgaaatgactggtagaagtcgtgaagaaattcgttatattatgtcccgaaatcttgaagtcatgaaagcttctgttattgatggattaacccctagtaaatcaatcagtggtttaacaggcggtgatgctgtcaagatggatcaatatttacaatcaggaaaaactatttcagataccacaatcctagctgccgttaggaatgctatggctgttaatgagttaaatgctaagatgggactggtctgtgcaacaccaactgcaggtagtgcaggatgtttaccagctgtgatttctacagccattgaaaagcttaatttaacagaagaagagcaacttgattttctatttacagccggcgcatttggtctcgtcattggtaataatgcctctatctcaggtgcagaaggaggttgccaagctgaagttgggtcagctagtgctatggctgcggctgctttagttatggctgctggaggtactcctttccaagctagccaagctatagcatttgttattaaaaatatgcttggacttatctgtgaccctgttgcaggtttagttgaagtcccttgtgtgaagcggaatgctcttggatcaagttttgcacttgttgctgctgatatggccttggctggtattgaatcgcaaattccagtagatgaagttattgatgcaatgtatcaagttggatcaagtttaccgactgcttttcgtgagactgcagaaggaggacttgctgccacgccgacaggaagacgttatagtaaagaaatttttggggaataaagtttatcaattttctactctttccctgaaaataaataaaaacgctacagctttactgtagcgtttttatttatttgttttagcaatctgtaattattgttgacaacagtgtaaagttaatttatagctattcactagtaaccccaagctgataaaccttgagcacgataagctttaatagctgaattaacttgatcctgaactgtagctgttgaaccccaacctggcatcgtttggaaaagtcctgaagctcctgaggcattagcaacattaggattaccatttgattcacgggcaataatatgttcccaagtagactgagggactcctgttgcagcagccatttgtgctgcagctgctgagccaatagcccctgcagtatttccattactcaatacttggccactcgtctggtgttgagcaggtctataagttgtctcagtaacagcataagcttgttgtgcctgactggtagcaggggtgttttctgttacaactgcttgttctacagctgcctcttcactcgcagtaacttgttgctgagaattagcttctgtagattgagaacttgattttggggcttcattagatgcctgagaaggttttggagcctgttttacatcttctacttttgatttagatgtcgccttagtcatttttgattttttggctacgcgaactttatctgcttttgacaaagattcagtagtaacttgtgaacttttaaagatgaccattacagccaaaatacatgaaaaaagggctactaaagtgatagctccataagctaaatgatgtttttttacattcaattttgataattttcttcttttattcatgttacctatattatactttatttgttaccttgcaattgaatagatgttaaaaatattacaaagagatttaattttaagtaaatctctttgttttatcaacttttattaataccagccgttactattccaaaatgatagcgctgccgaccaagatccgtaacgagaaaccacataattgtccgctactttttcttgattttcaggagataagtcgccatttaggtaagattgagacagttgatatcttccataatattgtccattctgtgcagtataactaccatttgattcacgacgagctatttcttcttttgcggctgaatcacttgaactcaaatttgatgaagaattcattgaattttcaattgttggttgagattttgcttctgcttgactagctgtagaattatccaattttaaaacatcacctatactgatgacatcagcgttactgatactattgagagacactaactcttgtaccgtagttttatgatttttagcaatagctgataaggtatcacctgatttcacggtataagatgctgcgcttactgaaagtggtaaagctaatgaagcacccactaaaagacctgccactcctaatttaaatggttttgattttttaaccgaggttattgacataatatatgctctctttcattaattgatacgcgtactatcataccttgtaaatattactaattgttttgccttagatgaaatttattacaaataaattgtaaattaataaagaaaaggcctccaaaaaacaatttttagttttctttaagtaaagttgttgagcttttcacattatataaatgaaaaggctaagaccataaactgatcttaaccttttaattttttaatagaaacaaactcaaacccaataataacataagtaatatactaaaagtatcccgaacagtccacttcaataaacggtacttactacgattggctccgccttgataacctcttgcttccatagcaattgccaacgcatctgctcttttaaaactagaagcaaataatggaatcaaaatagggataatagacttaaccttatgaattaggtttccctctccaaaatcaactccacgagctctttgagcattcatgatacgtgttgtatcatccattaaagtaggaacgaaacgtaagctaagggataacatcaaaccaatctcgtgtgctggtactctcagtacttccaatggttttaacaaagattcaacagcatctgctaaacttaacggagtagtagttaaggtaagtaatgtcgaaaagaagataattaaaacaaatctcataaaaataagtgctgcttgttgtaacccaaggctagtgatgctaaaaatccaaaacgagaagataacctgcccgccttgtgcaaacagcatctggaagagggttgtaaataaaataataccaaccatcggtttaataccattgaaaaaataggaaaattttatctgagataaacccacaataaccaacgtaaaaatgaatacgatcacatttgtcactacattatttgcccaaaaaacaataatgataaaaagcaacatggctagtaacttacttcgaggatctaatttatgaatgagagaattacctggtatgtaacgtcccaaaatcaatttatccatgcttaatagcctccacaaattcgttaatagtaattggtaaactaggtaaatttaatcccttatgagatagtctttgagcaaacttggtgattttgggaactcctaattgtttactttctaaaagttctacttcttgaaaaatctgttttggttgtcctgataaggttactttccctgcttctaaaacatacacatagtcagcataatccgctacatcgtccattaagtgagtcactaagacgatagtcattccttttttatgaagatttttaaaaagagtcattaattcttttcttcccttaggatcaagtccagctgttggctcatccagtactagtactttgggttccatcgctaaaataccagctatagcaacccgcctcatctgccctccagaaagttcaaatggatttttatcgaataaatcctcactgataccaactaaccttaatttttcttcagccagcctttcagcttcaatctgagaaataccaaaattttgtggtccaaaagcaacatcctttaaaactgtctcttcaaaaagctgactttctggaaattgaaaaactaaaccaactttttgccttataaatttgatttctttgttcttgtcccctgctttaatagaaaaatcatcgacaattacctcaccttttgtaggaatatgtaaaccattcaaaagttgcataatagttgattttccagaacctgtgtgcccaatgaacgcggtataggaagcatcttcaattttcagattgacgtcaaaaagggcacgcccttcaaaaggagtgccggcttgataggtataacttacatttttaaattcaattcccataattgttcttctaattccttctctgtaagatactctgtccctatatcaagaccattagcagccagttctgccattaacctacttgtaaagggaacatctaaacctaaactaatcaaacgatttccacgaccaaataacgcttttggagtggatgtcgactcaactttaccatttttcataacgatgacacgatcactcaatgcaacttcatctaagtcgtgtgtaattgaaataacagtaagattatatttttgacgaatagctcgtatcgttcttatcagttccaatcgtccctcaggatcaagcatactagtcgcctcatccaagatgataacttgtggacgcatagctacagctcctgcaatggctacacgctgcttttgtcctccagataaacgtgcaggctccctcattttaaattcagacattcctaccaaatcaagtgcttggtccactctttctttcatgtctttcaaaggaatacctttattttccaaaccaaaggcgacgtcatcttcaacagttgcccctacaaattggttatcaggattttgaaataccatgccaatcttgtgacgtaactcccagacattatcttcggttaactcttgtccatcaatgataatctggccagactccgcctctaaaagtccatctattaaacgaacagtagtggatttcccagaaccattatgaccaataatagatagccattctccttgtttcacatgaaacgatacattctccaattgataatgtgtttgattactatcatatttaaaaaagagattattaacggtaataatatttgtcattatttaaaagtatccttaaataagaagcctgcacctttaaaatagtcgtagcctgaatacaaggtaaagaatagagcaatgtataacatgatgttaccaagtgtcatccaatgtactaacaaaaaaataactgcaaacatttgagtagccgtctttattttccctggcatagctgcagcaagtactgttccacctgtttcaactaaaagtaaacgcaaacctgtaactgctaactctctacaaatgataatagctgaaacccaagctggtgctaagtctagtccaactaacatgataaaagcactcataactagcattttatcagctaatgggtctgcaaatttcccaaaatttgttactacttgccatttacgtgctagataaccatctaggtaatcggtcaaacttgcaatagcaaatacaatagctgcaacaatatgccaagttgtacttgttgttactgaagttaatactataaataacggaatcattaaaattctgactacagttaatagattcggaatattttctttcttcatcataaattctccttttggaaacatagtattcctatattatgttatttcaaaactagtaaaagacttttgacataccaactttatagatgtctaagcttccttattatatcaaaatttcagattatttacgaagattttggaaaaataacgaagtcagatgtgtcagcattatctaagaaatccttaccaatcgtaatgacatcttccaaatctaattcttcaacgatagatggcaaatccaaatacatcgtttttccatcatataaataggtgacgaattgcattgcgagattttcaatagaatctaagcttcttaaaaaatcgccatagagctctctcttaacgttttttaagtggctttcggtaagatcagatgattgcaaagcattttttagcaataacctcaactgagttgaaaaagcaattggctctgtcgtatctaaagaaataataacgcactcaaaatctggatgaacttcaatttctatatcaaaagaatcatcaatttgaccagattcgtaccagtcttggttaattgtagaagtccatcctaaaagcattgcaaaaaatagctgtaatccgattttctcttttaggtaagaaccatgtatcatatgatttgattttcgataaccaatagctaatttaggttttgtcactgtcatatggcaagagttgttttttataacaggctcaaggctaatagaatctcggtcaatattctgtgagtaacttgtgaaatgagaatttttttgaaggtaagttataatttcttgtggactaaattgtccaacaagaactaaattcatattagacaactgataaaagtctttgtgattttcttgtaaatcggttaaggttatttgagagattgattggtaatctccagcgatatcaaatgctaatggagagttggggtaaaggttcgataacactccttgataaagcctatattctgggtcatcttgatacatttcaatttcttgtttgataatatctttttctttagtaattgactcttctgtaaagtttgttgtcaatacaaagtcaagtagtatatctaagcagtttgtaatgtgacttatagttgaaaaataaaaactagttttatcaaaagttgtaaaggcgttactctcggcgccatatttagtaaattgagttgcagcgtcttgtcctttatccagttcaaataatttatgttctaagaagtgagcaattcctgccggataatgttctacacaaccattcctcgtatattttgtatggagtgatccaaaatttgctgtcaatactccaacagtttccttaaatgatggctttggaataaggtatacatttagtccgctctctaatgttaacttatatacttcctcctgaaggttctgataagttattttattaactgtcatcctagtttccttccaaaaaataaaaagcttgtaattttaattttgttgctacgctgacaatatctgattttgttacatcgtctactttgtcaatgaatagtgctgaagtatgaaactgatctaaataatgttcatgataaatgtggtcaactatgaccttaggattatcagaagctaaaacatagttcattttcaatatatcttttgtttgtttcaataatgtagaagaaaacctgcccatcttaatattattgaattgcttattaataagcttcaaaaaacgctcacgattctctttatcaatacctgcatatatcgtaaagagacctgtaaagctgtcaaattgactacctatagtataggctaaaccttgcttttctcgaatttctgtaaacaacaaggagtgggcaaaagcaccaaataaaccgttaaatactattaaagcaaaataatcttcatctttataagttattggaagatgataagccaattgcataatagattgattaacgtccttatcttctacttgacttctcgttatattttcataagtctgcgtataatcaaaagctaatactttgtgacgtggctcaaatgccatacgattaaaagcctgaatcattcgatagtcatcaaaatcccctacgacaaaaatatctaattgatcttccttaagcatcttctgaaattcttgataagctgtaaatgaattttctgattccactaaagatgctgtaccatacttaggtaaacgaagtgtcttattattgtagaataaagattttagtgctaagtcactgctataaaaattatcttcaatatcagcctctaaatattgaataaggtttttcttctcagtatcaaaaatagatgtttgatactgttctaaagaaattaaaggagaaaacagcatatcctccaagaatgtaataatttgttcaacgatattttcttgttctaaagtaaaggtatttttaacaaatacaatatcaatatcaacaatgtgaacaagacccttagtagaaatcttagttgataaactagcgccatataaggaagctaacttttctcgaaattcttgtaccttaggatacttagcatttgcagtaactaacatttgagcaacgagcgatctacgtgctactgttttattattaaaatcacctgaaaatcgaaaagtaagatgattagtcttaaattgttggtttttaattaaatgtagagaaacgccttcaactattttcattcaatatcctttgtgttctgtattgttagctaagattatatcatttttaaaggcgttaaaaaagattaaacatccaagatatgattaattctaaatttcaatcttcttcaaaattgacaaagtcgtcaaccaatatttactcccattttttataccttgtctccatatcataagttcaactcaaaaaataattttatgctataatgatgtgatatctaaaattggagattaaaaagtcatggattataaattatttgatgaatatattactttacaatcacttctaaaagagattggtatcattcaaagtggcggagccattaaaaaatttttagcggataatcgagtattgtttaacggtgaccttgaaaataggcgtggaaagaaactccgcctgggggatattattactattcctgatcaaaatatcgagatcattataaggaagccatcagatcaagaaattgaagaacgtaatatagaaatagctgaaaaacagcgtgtttcagcaatcgttaaagaaatgaataaaaacaccaacaaaggtaaatcaaaaactagcaaaaaaccagttcgctttccagggacataaaaatgtggataaaaaatatttctttaaaacattatcgtaattatgaagaagcacaagtagatttttcacccaacctcaatattttcattggccgcaatgctcaaggaaagacaaattttttagaagcaatctacttcttggctttgactcgaagtcaccgtacccgttctgataaagaacttgtacattttaaacaccatgatgtacaaattacaggtgaggtaatccgcaaaagtggccatcttaacttagatattcaattatctgaaaaaggaagaatcactaaagttaaccatcttaaacaggcaaaattatctgattatattggggctatgactgtcgtactttttgcccctgaagatcttcaattagttaaaggtgcacctagtctaagacgaaaatttttagatatagatattggacaaattaagccaacgtacttagctgaactttcaaattacaatcatgtattaaaacaaagaaacacttatctaaaaactactaataacgtcgacaaaacttttttaacagtccttgatgaacaattagctgattatggaagtcgtgtcattgaacaccgttttgattttatccaagccctaaatgatgaagcggacaaacatcactacattatcagtactgagttagaacatttatctattcactacaaatcgtcaatagagtttacagataagtcaagtattagggaacattttttaaaccaattatctaaaagccactcaagagacatctttaagaaaaacacaagcatcggacctcatcgtgatgatattactttctttattaatgatatcaatgctacttttgctagccaagggcaacaaagaagccttattttatcattgaaattagcagaaattgagctaataaaaaccgttaccaacgattatccgattctcttacttgacgacgtcatgagtgaacttgacaaccatcgtcaactaaaactcttagagggaatcaaagagaatgttcaaacatttattactacaacaagtttagaacatttaagtgctttacctgatcaactcaaaatctttaacgttagtgatggtactattagtattaatgaaaaaaaagcaacagattaatctgttgctttttaataagatttaacaataccaagtaatatagcacccataacaaaacaaaggatacccatgacaacccacttctgctctttcttcgtttttgtctcacctaaaaataaaataccaccaataatagagataattactccaagttgagaaaaactaaaagcaattgctagccctgctttagctgctgccaataacatgaagacattaccaacgccccacatgagacctgtaatcatatttttaacaacaacagcctcaaagttaacacgaaacttcatgaaacaaattgcacctagacacattccaacagccatgggtaaaataacggccatagcgtcgaacttcataatgttattaaataaaactgcgtatgagatgtaacctacagttgaataagcaattgtagcaaatccttttgaaaactcttgatgtgttgccaaagcttgttctgagacatcacgtttacttgagaaatagaagccgataactaataatgtcaacgctgtcaatcctaaaataaattggattggcttagtccattcatgaaagactaaagcaccaactaggcttccacctactaattgtgcaccacttgacagtggattagcaacagagactcccatatatttcattgcttggaattgaccattttggccgactgaccataggataccacctaagataccaaaaatccacaatgaggcagtcatctctggctgtttaaataaccatacgataatcgcaaatagcaatgctcctaaagtcattccaaatgtttgttgatttggacgtcctccaattttattactaacaaatccaatacttccccacgcaaacatgggaatcaatgcaataagtaaaccttccaattctttctccttacaatggaatattaagtattacctattttcaatcctagagaatctattgactaactttattagcaagatcagcaaatactatagctttatcaacactatctttttccaaagctataatgacttgttttatcaataaattgaccagtgatttagaataaggtaactgttctttagtcatattactaatcttatttaaaataacatcttcaggtaaaatatcttgaaaatagcagatgactttgaaataaaaatcattgtactgtgtcacaccattcagataagtaactaccaggttaatctcatcttgaggcagcctcatatttaaccctaaatttgaaataaaaagtttagccaatattttgagaacattgctttctattctatcacaggattgttgtttttggaaactgaaaattctcatgatatcttcattatctcgataagattccagtaaagttaattgctctaaatcagtattagaagttccagccttaacttttgaatctagaatggatacttcattgatagttaccccaacctccaacgtttgtaaagctttaataaatttatcaatacctatttgtgtctcaccattttcaaaacgtgatagagttgattttgataattgagcacttttggctagagaacttagggatatacctttgtcctctctcaactcttttaaaatttttccataatttttcatacaaaaactttactatatttgtttcttttatgcaacaaaaagcatcctcataggggatgctttttgcccttattttagtgtactgaataatttggtgcctcatttgtaatttgaacatcatggggatggctttctttcaagccagctcctgacatttcaacaaattgagcattatcatgaagttcttttatgttcgctgcacctacatatcccataccagagcgaatgccaccaagcatttggaaaacaatatcggctactgaacctttgtatgctacacgaccttcaataccttctggaaccaatttgttagcctcgtttacagaaccttggaaataacgatcgcttgaaccttttttcattgctgcaattgagcccataccacggtatgtcttgaacttacgcccttggaaaatttctgtttctcctggcgcttcatctgttcctgcaaacattgaacctagcataactgcatttccacctgctgcaagtgcttttacaatatcacctgaatatttaataccaccatcagcaatgatagtcttaccgtactcacgcgcaacagccgctgcatcgtaaatagctgtaatctgaggaacacctaccccagcaacgacacgagtcgtacaaattgaacctggaccaataccaactttaacgacatccacacctgcatcataaagtgcacgcgctccttctgctgtagcaatatttcccgcaatcaatgtgcgattagggaagtgagcacgaatttcagcaattttacggagcacaccagctgaatgtccatgtgctgtatcaatgacaatagcatctgcacctgcttcaaacaaagcttctgcacgttcaaaagtatcagaggttacacctactgcacctgcaactaagagacgtccaaattcatcttttgctgccttaggaaattcaataactttttcgatatccttaatagtaataagtcctgaaagacgtccctcatcatctactaaaggtagcttttcaatacgatgctcatgaagaatacgctctgcagtttcaagatctgtaccaataggagctgttacaagattttgacttgtcatgtgctctgagattagttgtttataatcagaaatgaaacgcatatcacggttagtaataattccaactaatttacgattctcgagtgtctctacaataggaactccactaatgcgatagttttgcatcaattcctcagcttcagagacagtattatctggtgtcaagaagaatgggtcaataataacaccattttctgagcgtttaactttacgaacttcttctgcttgatcaactattgacatatttttatgaatgataccaagcccaccagcacgtgcaatagcaatagccatcttactatctgtaactgtatccattgcagctgtaatgattggaatgtttaatgtcaaattatcagccaactttgtcttcatatcaacttcatttggtaaaacatggctttcagcaggaataagcagaacatcatcaaaagtaaaaccttttttcaaaaacttagtatcccaatttgacatcaaaaaatcctcttttcttagatagtagatataaaaaatcccattaaaattatattgttactatcatatcacgctaaaatcatttgtcaatataaaaagagcatagaattaatagcttctagctctttaaagtaatgaaaaaatcttcttaattttctatttttttgagaagaagaaaggcggcgtatactgacttaatttctcaaaacacttttgagcttcttcactattattacaaataatcaaacaagtatcatcaccacagacagttgctaagatctcaggtaataaaatcgaatctaatatggagccaaaagattgagctaagccaggtagtgtcttcaaaacgatttggttttgaactggaaacagcatgactagggcatcttccatgtaaaaacgtaaccgttcttcccaacgcttctgagatatactatgaatctcataataagtttctgtagcattatcactgctttcgttaaccttaattaaattaagttccttcatatctcgagataatgttgcttgcgtcactgaaacgccatttttttctagtaattcccttaactcatgttgtgtacgcaccttagtctcagagactaaggaacgaattaattggtgtcttgtttcttttttattcatataaactccttattcaatgaatttcttgaaataatttttattattatagagaagcttctttcctttcatttcaacgatatctttttggcgtaattcctttaaaacatgactaactgtctcgcgagtagttccgctcatattggcaatttcaatcgttgtaataggaaaaggtaaatgtcccctttctgtaggaacttgcaaaagtagagttgcaagcgattggataactctcatactggcacttgaagtcaccatattacgaagtcgtatttcatgaactcgtaatagcttagaatatttccgacaaagatgcttcatttgattgatattttgaagagagtattcttcgtataaagccattggcagagaaaaatactcaatatccgtaatagccactgctgaaaaatggtaatcatcatccaaaaagagacctccataaggaaaaaccgtaccttgtctaacataatctgtataaatgaaagaaccagaagcgtctgattgttcaatttttacatgtcctgactggattaaaaacagtttttcacggtaatcaccttcaaaaaataaggtatgattttttagagctgtacgatgtttaatgtggctcacaatatggtcaaattgttcaatagtaaagtgtttaaaatcatctagttgtctgaaataaaaatattgttcttttgtaatcacctgattttctagacctttctaatcattagatgcgaacattttttgtataatgaaaattttttaatgtataaaattttcttgtcacgataaatcctccttcattatagcaaaaaaattcgtagaaagaacgtttttcgttgaattttgaaaacgcttttgagaaaatgtaattgttctgatatcttttaaaaaaattgagaggccttcatgactaaatttattgttgattcatcgtactggaatttgtttccaacttctaaaattggagtaatcttaatcaaagattatcacatggacagaaaccttgaaacagaacttaaacagttactgtctgatagtcattctttagcaaaaaaatatttgcaagagaaagaattcagtcaaaacagagttatccaaacttatcgcaaagcatatcaaacctttaaaactaaaaaaggtgcacgttcaagtatcgaagcattattgaagcgagttaattcaggaaacgaaattactagtataaatcctctagttgatatctataatgccgctagccttaggtttggattacctattggtgctgaggatagtgatacatttagaggtgatttaaaactaactattaccaatggtggtgatgaattttacttgattggcgaagattttaacagaccaactctttcaggtgagcttgcctatgttgatgatgttggagcagtttgccgctgttttaattggcgtgatggaaaacgtactatgattaccgataatactcagaatgcttttttagttatcgaattaattgataatggaagagaaattatttttaaagaagcgttggactttatcgccaccaatacaaatcgttttctaaaagctaaaacacagaccatcatattagataaagaacacagtgaaataacgctataacattaaaacgaaaagtaaaaattttacttttcgttatttttttaggttaataatttctcactttccaacgataaaagaaagaaattgtatagaaatcgctttcatttctataaatttaaatttttttggatataatcgtgacattcttaacacttttaatgcgaataacttccctattttatattcaaaagaaagtagaatgtaaatgtagatatagagataaatcctgtttcaatacaaatctctaactaagaaaggagtaaaatatgactcaaacacatccaattcatgttttctcagaaattggaaaacttaaaaaagttatgctacaccgtccaggtaaagaaatagaaaatctgatgcctgattatttagagagactcttgtttgatgatatcccatttttggaagatgcacaaaaagaacacgatgcgtttgcacaagcacttcgcaacgaaggagtcgaagtactttaccttgaaaatcttgctgccgagtcgttaacaaaccaagaaattcgtgaacagtttatcgatgagtacattggcgaagcaaatgttcgcggtcgtgctactaaaaaagctattcgagaattattactcaatatcaaagataataaagaacttatcgaaaaaactatggcaggtatccaaaagtctgagctacctgaaatcccatcttctgaaaaaggtctaactgatcttgtcgaatctaattatccatttgccatagatccgatgccaaatctttactttacacgtgatccatttgcaactattgggaatggagtttcattaaatcatatgttctctgaaacacgtaatcgcgaaactttatacggtaaatatatctttacacatcacccagagtacggtggaaaagtccctatggtctatgaacgtgaagaaacaactcgtattgaaggtggagatgagcttgtcctttctaaagatgtccttgccgttggtatctctcaacgtactgatgctgcctctattgaaaaactcttagtcaatatttttaaacaaaatttaggttttaaaaaggttttagcatttgaatttgcaaataatcgtaaatttatgcaccttgacacagtctttacaatggttgactatgacaagtttacaattcacccagaaattgaaggcgatcttcgcgtttactctgtaacttacgaaaaccaagatcttcatattgaagaagaaaaaggtgatttggcagatcttctagcgaaaaacctaggagttgagaaagtggaattgattcgttgtgggggtgacaacttagtcgctgctggacgtgaacaatggaatgatggttcaaatacattaactatagcaccaggtgtcgttatcgtttacaacagaaatacaatcacaaatgcaatcttagagtccaaaggattgaaattaattaagattaatggaagtgaattagttcgtgggcgtggtggaccacgctgcatgtcaatgccatttgaacgtgaagacctttaaaatttatgaagctattagtcaatcacttgccttaccaaagagctgcaagcctatatattcgcttttctgttttcgttatcgaaagaaatataaaaatggaagaagaattcgatgataatgacgagcaagatactatttatgctgttctttatgatgggaaacagccagtttcaacaggacgctttcttcctgaaactcaaacagaagctcgtttgactcgaattgcgactttaaaaggttatcgtggtaacggctatggtaccaaaattattatagcactagaaaattatgcaaaagaaaatggttatcactatctaactatacatgctgaattgacagcaaaagatttctaccagacacttgggtatcaagctactgggaatatttatatggaagacggggaagcctgtcaaacactcgaaaaatatttaatttaaaggagacattaacatatgacacaagtatttcaaggacgtagtttcttagcagaaaaagatttttctcgtgaggaatttgaatatcttattgatttttcagctcatttaaaagaccttaaaaaacgtggtgttcctcatcattatcttgaaggtaaaaatattgctctcttatttgaaaaaacatctactcgtactcgcgcagcctttacaactgcagcaattgacctaggcgctcatccggaataccttggtgcaaatgatattcaacttggtaaaaaagaatcaacagaagatactgctaaggttttaggacgtatgtttgatggtattgaattccgtggttttagccaaagaatggttgaagagcttgctgaattttctggagtacctgtctggaatggtttaacagatgaatggcatccaacacaaatgctagctgactaccttactatcaaagaaaacttcggtaaacttgaaggtattactcttgtttactgtggtgacggacgtaacaatgttgccaactcgcttttagtggctgggactttgatgggggtcaatgtacacatcttttctccaaaagaacttttccctgctgaagagattgttaaattggctgaagaatatgccaaagagtccggggctcacgttctcgttactgataatgtagacgaagctgtaaagggagcagatgtcttttacactgatgtctgggtatcgatgggagaagaagataagttcaaagaacgcgttgaacttcttcaaccatatcaagtaaacatggaactgattaaaaaagctaataatgataatcttatcttcttacactgcttacctgcattccatgatacaaataccgtttacggcaaagacgtcgctgaaaaatttggcgtcaaggaaatggaagttactgatgaagtcttccgtagcaaatatgctcgtcatttcgaccaagctgaaaatcgtatgcacactattaaagctgtaatggctgcaacccttggaaatcttttcattccaaaagtttaaattaaacgactatagggagttgacatatagtcaattccctattttaggaaatgaggtataaaatggaaaaagaaaaaaaattaggtcttttaccactaacaatgcttgtcattggctctcttatcggtggcggaatctttgatttaatgcaaaatatgagttccagagccggtttggtaccaatgcttattgcttgggtaattactgctatcgggatggggactttcgttttaagttttcaaaatttatctgaaaaaaggccggacctaacagctggaatctttagttacgctaaagaggggtttggaaactttatgggatttaactctgcatggggttattggttatcagcttggcttggaaatgttgcctacgctgcactcttattcagttcactcggttatttctttaaattctttggtaatggaaataatatcatctcaattattggagcaagtatagttatttgggttgtccatttcttaattttaagaggtgttaatacagctgcatttattaataccatagttacctttgcaaaattagtacctgttattattttcttaatttcagcgttattagctttcaaatttaacatttttagtcttgatatctggggaaatggattacatcaatcaattttcaaccaagtcaattcaactatgaaaaccgctgtttgggtatttattggtattgagggcgccgttgtcttctcaggtcgtgctaaaaaacactctgatattggtaaagcaagtatcctagcattattcactatgatttcactttatgtattgatttctgttttatcacttggtatcatgtcacgtccagaacttgcaaacttaaaaacaccagctatggcttacgttctagaaaaggctgttggtcactggggcgctatcttagttaaccttggtgttatcatttcagtatttggcgctattcttgcttggactttatttgcagcagaattaccatatcaagctgctaaagaaggtgcttttcctaaattctttgcaaaagaaaataaaaacaaagctccaatcaattcactcttagtcactaatctttgtgtacaagcattcttaatcacgttcttattcacacaaagtgcttatcgttttggtttcgcattagcatcatctgctatcttaattccttatgcttttacagcactatatcaattacaattcacactccgtgaggataagtcaactccaggacatcaaaagaatttaattatcggtatcctcgctacaatctatgctgtttaccttatctacgctggtggttttgattacttacttttgacaatgattgcttacactctaggtatgattctctatattaaaatgagaaaagatgacaagcttcctatctttgtgggatatgaaaaaattagtgccattgtcattctagcgctttgcttattatgtattattgaaattatgactggacaaattgacattgctgcaatcctagcaggttagtcattagaaagagggataaattggtaaaagaacatcaaaaaatcgtagttgccttaggtggcaacgctattctatcaacagatgcttcagcaaaagcacaacaagaagcattaatcaacacatcaaaatcactggtcaaactgattaaagaaggccatgatgtcattgttactcatggaaatggtccccaagttggtaacttattgctacagcaagcagcttcagattctgaaaagaatccagcaatgcctttggatacttgtgttgccatgacagaaggaagtattggtttttggttacaaaatgctcttaacaatgaattacaagaacaaggcattgacaaagaggttgcaacagtggtaactcaagttattgtagatgaaaaagatcaagctttcactaatccaacaaaacctattggcccattcttatctgaagaagatgccaagaaacaagcccaagaaacaggttcaaaatttaaagaagatgctggccgtggatggcgtaaagtcgttccttcaccaaaaccggttggtatcaaagaagcttctgttattagacggttagtggactctggtgtggttgttattagcgcaggtggcggaggtgtaccagttattgaagatgctaatacaaaggcattaaaaggggttgaagctgttattgacaaagactttgccagtcaaactttatcagaacttgttgatgctgacttattcatcgtcttaactggcgttgacaacgtttttgttaattttaataaacctaatcaagaaaaattagaagaagttactgtttcacaaatgaaacaatatatcactgaaaatcaatttgcccctggaagtatgctaccaaaggtcgaagctgcgattgcttttgttgaaaataaacctgaatcacgagctattattacttcacttgaaaatattgataatgttttagcccaaaatgcagggacacaaattgttgcaaattaaacaatgtagattaccattacatacactccttattaatgtcactccttaggcattcctataataaaagagagctagatatatctagctctcttttattataggacatatattatttaaaatagttcaaacccatggctgatttaacctcatccaaagtagaggctgcaacagcttgagctttctcactacctttttgtaacatttgataaacttgtcccatatctttagcatattcgaggcgacgttctctaataggtgataattcacgctctaagatatcaagtagataacgttttgttttaacatccccaagtccacctttttgatagtgttctttcatagcagtaatctctttttggtcttcatctcttccaaaaacatcaaggtaatgaaataccatattaccttcgatttgtcctggttcttctactttaatgtggtttggatcagtatacatactcataacttttttcttaactgtatccatatcatctgctaaaaagattccattatttaatgacttagacatttttgcattaccatctaaccctggcagacgacctgctgcatcattttctggatagattccctctggttcaactaaaacctgacaattataagcatgattgaaagatctaactatttcacgtgtttgttcaatcattggtttttggtcagtccctacaggaacaaggttagctttaaaagcggttatatcagctgcttgtgcaacaggataaactaagaatcctgctggaatagactcaccaaaacctttttgagcaatttctgtttttacagttggattacgttctaaacgtgcaagtgaaaccaagttcatataatacatacttaattctgctaactcaggaatttgactttgaatgaataaagtcgacttgtttggatctaacccaacagctaaataatcaagtgcaacattaccaattgattcaacaatagtttgcggatctttagcatggtctgtcagtgcttgttggtctgctaaaaagacaaataaagtatagctaccctcattttgaagtagaactctattttttaagctacctacataatgtccaatatgcaactttcctgtcggtctatcacctgttaagataattggttttgtcatgtttactccttaatataccaaagatatcatttcatatagttatcttatcatgtcacaagccctattgcaattcatccctacaagaaacattcaccttattaagatgattaaacattatgtaacgttaaatcgttcttaataatttcaatcgtataatgaatcataataattaaaagcgttatcgtcacacctaaaatagctctatatgcaaaaatatcgtaaactattgcagctaccaatgctccaataataaatgctagaactaccagtgaataattgatagctcgtcttttttgcatagccgttctctgacgattaacaatatactcataccaaaattgtagcattttccgataattaccagaagtcattaagatagtatatggttccgattcaatgcgacttcctgaaaatgtcaacattaaaatacctgtgctaaaggctaataaagctacccagatattgtggtttacattttcaacaaaaggaataaacatcgtagaaagtaaaaggggacataatgcatatagacgccaaaaagctgttactgcacgttctttaatcacaataccaaccaaaaaaccaattgaaaaaaagaaaatagaaaataatttagtgataaaaaagtgaaaatcattttgtccgagatttgccaccatcaagataatattacctgtctgtgttgcaacaagggagtgaaactgcatgtgactataaacgtcaataaaaccaccaataaaacccaataatacagccatttttcttccatcttgtggcattataatatcatctctgcgcattatagcaaattctccttcttgtattatcatgttttctattatataccaataaaataggcattcaactcaaaaatatcgagaaatttcttttctaaatttacttgactaccaagtctcgctgttagataataggtaataataagttttgataaaataaaaatgttatgactgagttgtcaatattatttattgacagctttctctttttatcatgttattattactaaagttaaggagcttatcatgtctaaaaaaattaagaattttatactattaaatattggatctctaattgttgcatttggtttcaacgctttctttcttcataatcatattgtcacgggggggattagtggtttggcagttagttttcatgaagtatttggttgggattctgctttttttattatgattatcaatattccattgctccttctttgctactttggcttaggtaaacaaacctttttaaaaactgtctatggttcttggatttttcctgtttttattaagttaacacaaagtgtaccaactttgacccacaacccactcctcgcagcactttttggaggtgttattgtaggatgtggtttggggattgttttttggagcgactcttcaactggtggaacggggattatcattcaattcttaggaaaatatactcctataagccttggacaaggggttatattgattgatggacttgttacaattgttggtttcctagcttttgacagtgatacggttatgttttctattattgggttgataactattagttatattattaatgctatccaaactggatttacaaccttaagcactgtcttaatcgtttctcaagagcaccaaaaaattaagacatatatcaatactgtcgcagatagaggagtaacagaaattcccgttaaagggggatattctggaactaatcaaatcatgcttatgacaactattgctggttatgagtttgctaaattacaagaggcaatagcagaaattgacgaaacagccttcataacagtaactccaacatcacaagcttctggacgtggatttagtcttcaaaaaaatcatggacgtcttgatgaagacattcttatgccaatgtaatcgattgataattaaagctttttctagtagaatagcagatagaatatacacaagaggtaacaaaattgcttacagtttcagatgtttcactacgttttagtgatcgcaaattatttgatgaagttaacattaactttacagcaggaaatacctatggtcttatcggagcaaatggcgctggtaaatcaactttccttaaaattttagctggtgatattgaaccaacaacaggacatattgcacttggcccagatgaacgcctttctgtacttcgccaaaatcattttgattatgaagatgagcgcgtcattgatgtcgttatcatgggtaatgaaacactttatagtatcatgaaagaaaaggatgctatctacatgaaagaagatttttctgatgaagatggtgttcgcgctgcggaattagaaggagaatttgctgaactcggtggatgggaggctgaaagtgaggcttctcaattactccaaaatctaaatatttcagaagagcttcattatcaaaatatgagtgaactagctaatggagacaaagttaaagttctccttgcaaaagctctctttggtaaaccagatgtacttctccttgacgagcctaccaatggacttgatatccagtctattacttggttagaagatttcttgattgactttgaaaatacagttattgtagtttcccacgaccgtcatttcttgaataaagtatgtacacatatggctgaccttgattttggaaaaattaaactgttcgtcggtaactatgatttctggaaagaatcatcagaattagcagctcgtttacaagctgatcgtaatgctaaagcagaagaaaaaattaaacaacttcaagaattcgttgcacgattttcagcgaatgcttcaaaatcaaaacaagcaacttctcgtaaaaaaatgcttgataaaattgaacttgaagagattgtaccatcaagccgtaaatacccattcgttaactttaaagccgaacgcgaaatgggaaatgatttattgaccgttgaaaatctctctgtcactattgatggggaaaaaatccttgataatatcagtttcattcttcgtcctggtgataaaactgcacttattggacaaaatgatatccaaactactgcacttattcgagcattgatgggggatatcgaatatgaaggaacaatcaaatggggagtaacaactagtcgttcttaccttccaaaagacaattcacgagattttgcttctggcgagtcaatcttagaatggcttcgtcaatttgctagtaaagaagaagacgataataccttcttacgtggtttcctaggtcgtatgcttttctctggagatgaggttaacaaatctgttaatgtcttatctgggggtgaaaaagtacgcgttatgctttcgaaattaatgctattaaaatctaatgttcttgttcttgatgatccaacaaaccacttagatttggaatctatttcaagtctcaacgatggactaaaagatttcaaagaatctattatttttgcaagtcatgaccacgagtttattcaaactttagcgaaccatattattgttctttctaaaaacggagttatcgatcgtatcgatgaaacttacgatgaatttcttgaaaataccgaagtacaagctaaggtcgctcaactctggaaataatcctttggcatatctctaacctaataaacgtgtcaagattgaaaatcttaaaactatattaatcatttaaataaaaaggttggaacaaatagtgtccagcctttttatcttaggagatatatatgacaattaaccactataagcttcgtataccttactatacaataagctttctacttcccttcataatcatagtctgtatcctctttactaagaatatttattggggaagtccaacaaccatattagcaagcgatggctttcatcaatatgttatctttaatcaagcattaagaaatattcttcatggttcaaacagcttattctatacctttacaagcggtttaggtttaaatttttatgctctgagtagttactatttgggaagttttttatccccaatagtttatttctttaacctaaaaaatatgcctgatgctatctaccttttaacaatatgtaaaatagggttgataggtttgtcaatgtttgtcactctttgtaaacgtcattgtaaagttaatcgtgtcttacttttagtaatttctacttgctatagcttaatgagtttctcaattagccaaattgaaattaatatgtggctagatgtatttattctaattccccttgttgttttaggagttgatcagctactatgggaaagaaaacctatactttatttcctctctctgacagccttattcatccaaaactattattttggttttatgactgccatctttactagcctttacttcatcgtacaaataacccgtaatactgatagtaaggttgcatttaaacaatttcttcattttacctttttatctcttttagctggtatgactagtagcattatgattttgccaacttattttgatttaactactcatggtgaaaagttgacaaaggtatcgaagatgtttacagaaaattcttggtacatggatttgtttgctaaaaatatgattggagcctatgatacaacaaaatttggctctattcctatgatttatgtaggtttacttcctttactcctttctttactttactttacaataaaggaagttcctcgaaggactagattagcatatggatttttaataatatttgttattgctagtttttatataacacctctagatttattttggcaagggatgcatgctccaaatatgtttctccatcgctactcttgggtactttcagtacttatctgtctgctagctgctgaatgccttgagtatttagacaacatttcttggaaaaagattttaggggtcaatttaattttagtaagtggtttcataatcacgtttttatttaaaaagcattatcattaccttaatcttgaattacttcttttaaccttaactttcctctcagcttatattattctaactattagttttgtcagtaagcaaatccctaaattagttttttatccctttcttattggttttgttgtattagagatgacattaaacaccttttaccaactaaatagtcttaacgatgaatggatatttccatctaggcaaggatatgctaaatataatcacagcattagcaaacttgtcagaaagactgagagaaataactctacattcttccgtacagagcgctggttaggacaaaccggcaacgactctatgaaatataattataatggtatttcacaattttcatctattagaaatcgttcttcaagtcaagtgcttgatagacttggctttaaatcagatggtacaaatttaaatttacgttatcaaaataatactttgatcgcagatagtctatttggtgtgaagtataaccttacagaatatccttttgataaatttggttttatcaaaaaagctcaagataaacaaaccattctttacaaaaatcagtttgccagtcaattagctatactaacgaatcaagtatatcaagataaaccatttactgtgaatactttggataatcagacaactcttttaaatcaattaagtggtttgaaagagacgtattttgagcatcttattccaaatagcgtttctgggcaaaccactcttaataaacaagtatttgttaaaaagaataaacaagggaatactgaaattacctataacataactatccctaaaaacagtcagttatatgttagtatgccgtttataaattttaataatgaggaaaataaaattgttcaaatctccgttaataatggaccatttgtacctaatactcttgataatgcttattcattttttaatattggttcctttgctgaaaacagtcgtatcaaagtaaaatttcaatttccacacaatgatcaagtttctttcccaattcctcacttttatgggctcaagttagaagcttatcaaaaagctatgactgttattaataaacgaaaagtaaaagtaagaactgatcacaataaagttattgctaattatacaagtcctaatagaagttctcttttcttcactattccctatgataggggttggaaagcttatcaaaataataaagaaataaaaattttcaaagctcagaaaggttttatgaaaataaatattcctaaaggaaaaggcaaagtaacattaatttttatcccttacggctttaaatttggggtaggcctatctattactggaatagtattatttactgtctattattttaaatttggaaaaaataaaataggatgagagtattctcatcctattttattaacaaaaaaacgccgacaaatcaacgtttagatgtgtcttatcactccggcagcaggactcgaacctgcgacatcatgattaacagtcatgcgctactaccaactgagctatgccggataaataaaaaactgcaaagcagttatcaatagtccgtacgggattcgaacccgtgttaccgccgtgaaaaggcggtgtcttaaccccttgaccaacggaccataggttaggtgtttccttagtactcttaatattatatcagaaaaaaaaggtttgtctatacttttgttcaataatttttacaaaaaaattgaacctacttatgagcaaaaaaatatatttccaactcataaatagtacatatgaaaacttgacagcctgcctaatattttggtagaataacagagttgatggttccatagctcagctggatagagcattcgccttctaagcgaacggtcgcaggttcgaatcctgctggaatcagatattgaaagcctagatagattatctaggctttttatttgtttttagcagttgtttcataaatggaacgattatttgtggtaaggagtgccttgacgaatcataaaagcacgataaatttgttccatcaagactaatttcataagttgatgaggtaaggttaacagtccaaaactcattaaataatcagcacgttttttcactttttgagataaacccaaactaccaccaataacaaaagtaatagtagagtagccggatatcattttttgatcgattagatggctaaatgattcagatggcaattgtttcccttctatagctaaaccaatgacataatccctctcacctattttactcaaaatacgttccccttctatatctaaaattctttgattttcagatatactagctttatcaggtgtcttttcatcagctagctcaattgtctcaattttagaaaagcgattcagacgtttctgatactctgcaacaccttctttaaggtatttctctttcaattttccaactgtaattatttttaatttcatagctacattataacataatccacaatattttcacaatttatccacatgtttatccttacatatccccttattttataggtattctataactataatcaaggttatccacaagttgtggatatttcctttttttagcttttaaggtataattaagaagcttgtcataagattagtataaaaatttacggaggtagctatttgtgaaaaaaaaattagtctcatcacttctaaagtgttctctaatcattattgttagctttgctggtggagcatttgctagttttgtcatgaatcataatgacaatattccaaatggtggtgtcactaaaactagtaaagtaaattataataacataacgcctacaacaaaagctgttaaaaaggtacaaaatagtgttgtttctgttatcaattataaacaacaagagagtcgttctgacctatcagacttctatagtcatttttttggtaatcaggggggcaacactgataagggcttacaagtttacggtgaaggctctggagtcatctataaaaaagatggtaaaaatgcctatgttgtcactaataaccacgtcattgatggggctaaacaaattgaaattcaactagctgatggctcaaaagcagttgggaaacttgttgggtcagatacctactctgatttagccgtcgtcaaaattccatcagataaggtttcaaatattgcagaatttgctgattcatcaaaactcaacattggtgaaactgctatagcgatcggaagccctcttggaactgagtatgcaaattctgtaactcaaggtattgtatctagtttaaaaagaactgtaacaatgactaatgaagaaggacaaacagtttctacaaatgctatccagactgatgctgctatcaatcctggtaattcaggtggagcacttatcaatattgaaggacaggttattggaattaattctagtaaaatttcttctacatcaaatcaaacctcaggacaatcgtcaggaaatagcgttgaaggtatgggatttgccattccttcaaatgatgttgttaagattatcaatcaacttgagagtaacggacaagtagagagacctgctctaggtatttctatggctggattaagtaatttaccatccgatgttattagtaaactgaaaatcccaagtaatgttactaatggtattgtagtagcatctatccaatctggcatgccagctcaaggcaaactaaagaaatacgatgtcattactaaagttgacgataaagaagtagtatctccaagtgatttacaaagtttactctatggccaccaggtaggggattccataacagtaaccttttatcgtggtgaaaataaacaaacagtcactataaaacttactaaaactagtaaagatttagctaaacaacgagcaaataactaaatcaattctagttattttaactaagatatagtaaaattaaaggggttggtcagatagaccaatccctttagtaagtctatagaatctgaggtctaaaatggaatatttagaaacgatcaacatcaatcatattgctccaaatccgtatcaacctcgcctagaatttaatacaaaagaactagaagaattagccaactctattaaaattaatggccttatccaacccattattgtaagaccgtcagcagtctttggttacgaactggtagccggagaacgacggctaagagccgcaaagttagctaaattggaaagtatacctgcaattataaaatcctataataatgatgatagtatgcaattagctattgtcgaaaatttacaacgatctaatttgtcacctattgaagaggctaaagcctactctcaacttctacaaaagaaaagtatgacacatgaagagttagcaaaatatatgggaaaatctcgtccctatatatcaaatacgatacgactactaaatttaccgccactaattacttcagctattgaagaaggaaaactttcctctggtcatgcgcgtgcactactcagtctaccagatgctagtcaacagaaagattggtatcagagaatcctcactgaagatattagtgtaagacgactagagaagttattaaaacaagaaaagaaaacaaatcataagtcacttcaaaataaagatgtctttctaaaacatcaagaaaatgagttagctcaatttctaggtagcaaagtgaaacttactattaataaagatggtgctggcaatataaagattgctttcgctaaccaagaagaattaaacagaattatcaacactctaaaataagggtgttgattatttttttatttaatcaaacttatccacaaggtattttgctatttttctgttgattctctaatttccacagtctgtggaaaacttt
